(19) United States
(12) Patent Application Publication
(10) Pub. No.: US 2023/0272429 A1
(43) Pub. Date: Aug. 31, 2023

(54) MODIFICATION OF BLOOD TYPE ANTIGENS

(71) Applicant: Sana Biotechnology, Inc., Seattle, WA (US)

(72) Inventors: William DOWDLE, South San Francisco, CA (US); Andrew MAY, San Francisco, CA (US); Sonja SCHREPFER, South San Francisco, CA (US)

(21) Appl. No.: 17/792,121

(22) PCT Filed: Jan. 12, 2021
(86) PCT No.: PCT/US2021/013140

§ 371 Date: Jul. 11, 2022

Related U.S. Application Data
(60) Provisional application No. 62/960,617, filed on Jan. 13, 2020.
(60) Provisional application No. 62/960,607, filed on Jan. 13, 2020.

(51) Int. Cl. C12N 15/90; C12N 9/22; C12N 15/11; A61K 35/545

(52) U.S. Cl. CPC C12N 15/907; C12N 9/22; C12N 15/11; C12N 15/111; A61K 35/545; C12N 2310/20; C12N 2800/80

(57) ABSTRACT

Provided herein are cells with a gene modification of an ABO gene, RHD gene, and/or FUT1 gene. In some embodiments, the cells express reduced levels of a MHC I antigen and/or a MHC II antigen. In some instances, the cells are also hypoimmunogenic cells.

### CROSS-REFERENCE

[0001] This application claims priority as a 371 of International Application No. PCT/US21/13140, filed Jan. 12, 2021, which claims priority under 35 U.S.C. § 119(e) to U.S. Provisional Application No. 62/960,607, filed Jan. 13, 2020, and U.S. Provisional Application No. 62/960,617, filed Jan. 13, 2020, the disclosures of which are herein incorporated by reference in their entirety.

### BACKGROUND OF THE INVENTION

[0002] Blood products can be classified into different groups according to the presence or absence of antigens on the surface of every red blood cell in a person's body (ABO Blood Type). The A, B, AB, and A1 antigens are determined by the sequence of oligosaccharides on the glycoproteins of erythrocytes. The genes in the blood group antigen group provide instructions for making antigen proteins. Blood group antigen proteins serve a variety of functions within the cell membrane of red blood cells. These protein functions include transporting other proteins and molecules into and out of the cell, maintaining cell structure, attaching to other cells and molecules, and participating in chemical reactions.

[0003] The Rhesus Factor (Rh) blood group is the second most important blood group system, after the ABO blood group system. The Rh blood group system consists of 49 defined blood group antigens, among which five antigens, D, C, c, E, and e, are the most important. Rh(D) status of an individual is normally described with a positive or negative suffix after the ABO type. The terms “Rh factor,” “Rh positive,” and “Rh negative” refer to the Rh(D) antigen only. Antibodies to Rh antigens can be involved in hemolytic transfusion reactions and antibodies to the Rh(D) and Rh(c) antigens confer significant risk of hemolytic disease of the fetus and newborn. ABO antibodies develop in early life in every human. However, rhesus antibodies in Rh− humans typically develop only when the person is sensitized. This can occur, for example, by giving birth to a Rh+ baby or by receiving an Rh+ blood transfusion.

[0004] A, B, H, and Rh antigens are major determinants of histocompatibility between donor and recipient for blood, tissue and cellular transplantation. A glycosyltransferase activity encoded by the ABO gene is responsible for producing A, B, AB, O histo-blood group antigens, which are displayed on the surface of cells. Group A individuals encode an ABO gene product with specificity to produce α(1,3) N-acetylgalactosaminyltransferase activity and group B individuals with specificity to produce α(1, 3) galactosyltransferase activity. Type O individuals do not produce a functional galactosyltransferase at all and thus do not produce either modification. Type AB individuals harbor one copy of each and produce both types of modifications. The enzyme products of the ABO gene act on the H antigen as a substrate, and thus type O individuals whom lack ABO activity present an unmodified H antigen and are thus often referred to as type O(H).

[0005] The H antigen itself is the product of an α(1,2)fucosyltransferase enzyme, which is encoded by the FUT1 gene. In very rare individuals there exists a loss of the H antigen entirely as a result of a disruption of the FUT1 gene and no substrate will exist for ABO to produce A or B histo-blood types. These individuals are said to be of the Bombay histo-blood type. The Rh antigen is encoded by the RHD gene, and individuals who are Rh negative harbor a deletion or disruption of the RHD gene.

[0006] The availability of cell-lines suitable for therapeutic applications is severely limited and often the available cell lines are not universally histo-compatible with all possible recipients.

[0007] There remains a need for novel approaches, compositions and methods for generating histo-blood type cells that are useful for cell therapies.

### BRIEF SUMMARY OF THE INVENTION

[0008] In some aspects, provided herein is an isolated cell in which expression of an ABO gene is partially or fully inactivated by a deleterious variation of the ABO gene or by insertion of an exon 6 258delG variation of the ABO gene, and/or expression of an RHD gene is partially or fully inactivated by a deleterious variation of the RHD gene.

[0009] In some embodiments, expression of the ABO gene is partially or fully inactivated by an insertion or deletion within ACACCT of exon 1; AGTGCG of exon 2; or CAAGCGC, GGCGCA, TGGGCG, ACCACG, GCCGCA, CCACGT, TGCCGT, TACTCG, ACTCGG, GAGCGC, GCCTGG, GTCCTT, TCACGC, TGGACG, TGGTCG, GCTGGC, CACGCG, AGGTGA, or GCATCG of exon 8 of the ABO gene.

[0010] In some embodiments, the deleterious variation of the ABO gene is generated using CRISPR-Cas9 gene editing comprising a guide RNA target sequence comprising one selected from the group consisting of those in Tables A-C.

[0011] In some embodiments, the deleterious variation of the ABO gene comprises an insertion/deletion in a coding exon and the guide RNA target sequence comprises SEQ ID NO:1 or SEQ ID NO:2.

[0012] In some embodiments, the deleterious variation of the ABO gene comprises a frame-shift insertion/deletion and the guide RNA target sequence comprises SEQ ID NO:3.

[0013] In some embodiments, the deleterious variation of the ABO gene is a homozygous variation such that the cell is a histo-blood type O cell.

[0014] In some embodiments, the exon 6 258delG variation (e.g., the deletion in exon 6 of G at nucleotide position 258) of the ABO gene is generated using CRISPR-Cas9 gene editing comprising a guide RNA target sequence comprising one selected from the group consisting of SEQ ID NOS:3-5 and a homology directed repair (HDR) template comprising a sequence encoding the 258delG variation, a PAM sequence, a spacer region, and two homology arms, each comprising about 10 nucleotides to about 1 Kb of homologous sequence to the ABO gene.

[0015] In some embodiments, the HDR template further comprises one or more silent mutations in the PAM sequence and/or the spacer region to ensure that the HDR template is not cleaved by Cas9.

[0016] In some embodiments, the exon 6 258delG variation of the ABO gene is generated using CRISPR-Cas9 gene editing comprising a guide RNA target sequence comprising one selected from the group consisting of SEQ ID NOS:3-5 and the HDR template comprises one selected from the group consisting of SEQ ID NOS:6-8.

[0017] In some embodiments, the exon 6 258delG variation of the ABO gene is a homozygous variation such that the cell is a histo-blood type O cell.

[0018] In some embodiments, the deleterious variation of the RHD gene is generated by using CRISPR-Cas9 gene editing comprising one or more guide RNA target sequences comprising one selected from the group consisting of those in Tables D-F.

[0019] In some embodiments, the deleterious variation comprises a deletion of a genomic region comprising exons 1-8 of the RHD gene and is generated by using CRISPR-Cas9 gene editing comprising a guide RNA target sequence comprising SEQ ID NO:11 and another guide RNA comprising SEQ ID NO:12.

[0020] In some embodiments, the deleterious variation of the RHD gene comprises a frame-shift insertion/deletion and the guide RNA target sequence comprises SEQ ID NO:9 or SEQ ID NO:10.

[0021] In some embodiments, expression of the RHD gene is partially or fully inactivated by an insertion or deletion within TCATGG, GAGGTG, AACTCG, AGTTTC, TTGGCT, or CACAGC of exon 2; CCGTGA of exon 3; GGGTAG or AGGGAA of exon 4; TTCGAT, TCAGCG, CATAGT, or ATCGAA of exon 5; CGTCGG or TCCGTC of exon 6; CGGCAA, CGGAGC, TACCGT, GCTTGC, or CTTGCT of exon 7; or GGTTCT or TCCTAC of exon 8 of the RHD gene.

[0022] In some embodiments, the deleterious variation of the RHD gene is a homozygous variation such that the cell is a Rhesus factor (Rh) negative cell. In some embodiments, the deleterious variation of the RHD gene is a homozygous variation such that the cell is a type O negative cell.

[0023] In some aspects, provided herein is a cell in which expression of an ABO gene is partially or fully inactivated by a deleterious variation of the ABO gene or by insertion of an exon 6 258delG variation of the ABO gene.

[0024] In some embodiments, the cell is an Rh negative cell. In some embodiments, the deleterious variation of the ABO gene is generated using CRISPR-Cas9 gene editing comprising a guide RNA target sequence comprising one selected from the group consisting of those in Tables A-C.

[0025] In some embodiments, the deleterious variation of the ABO gene comprises an insertion/deletion in a coding exon and a guide RNA target sequence comprises SEQ ID NO:1 or SEQ ID NO:2.

[0026] In some embodiments, the deleterious variation of the ABO gene comprises a frame-shift insertion/deletion and the guide RNA target sequence comprises SEQ ID NO:3.

[0027] In some embodiments, expression of the ABO gene is partially or fully inactivated by an insertion or deletion within ACACCT of exon 1; AGTGCG of exon 2; or CAAGCGC, GGCGCA, TGGGCG, ACCACG, GCCGCA, CCACGT, TGCCGT, TACTCG, ACTCGG, GAGCGC, GCCTGG, GTCCTT, TCACGC, TGGACG, TGGTCG, GCTGGC, CACGCG, AGGTGA, or GCATCG of exon 8 of the ABO gene.

[0028] In some embodiments, the deleterious variation of the ABO gene is a homozygous variation such that the cell is a type O negative cell.

[0029] In some embodiments, the exon 6 258delG variation of the ABO gene is generated using CRISPR-Cas9 gene editing comprising a guide RNA target sequence comprising one selected from the group consisting of those in SEQ ID NOS:3-5 and a HDR template comprising a sequence encoding the 258delG variation, a PAM sequence, a spacer region, and two homology arms, each comprising about 10 nucleotides to about 1 Kb of homologous sequence to the ABO gene.

[0030] In some embodiments, the HDR template further comprises one or more silent mutations in the PAM sequence and/or the spacer region to ensure that the HDR template is not cleaved by Cas9.

[0031] In some embodiments, the exon 6 258delG variation of the ABO gene is generated using CRISPR-Cas9 gene editing comprising a guide RNA target sequence comprises one selected from the group consisting of SEQ ID NOS:3-5 and the HDR template comprises one selected from the group consisting of SEQ ID NOS:6-8.

[0032] In some embodiments, the exon 6 258delG variation of the ABO gene is a homozygous variation such that the cell is a type O negative cell.

[0033] In some aspects, provided herein is an isolated cell in which expression of a FUT1 gene is partially or fully inactivated by a deleterious variation of the FUT1 gene and/or expression of an RHD gene is partially or fully inactivated by a deleterious variation of the RHD gene.

[0034] In some embodiments, expression of the FUT1 gene is partially or fully in isolated activated by an insertion or deletion within ATCGAC, AGTACG, CGCCCT, GTTTGC, CGACAA, GGTGCG, CGCCGT, ACGCCG, CCGGTT, CGCGGG, TTTTCG, ATACCG, GTGCGC, CCATTG, TGTCGG, ATCTGC, CTTTGT, GGGGCC, GGCCAT, TGCGAT, CGTGCA, or ATGGAC of exon 4 of the FUT1 gene.

[0035] In some embodiments, expression of the RHD gene is partially or fully inactivated by an insertion or deletion within TCATGG, GAGGTG, AACTCG, AGTTTC, TTGGCT, or CACAGC of exon 2; CCGTGA of exon 3; GGGTAG or AGGGAA of exon 4; TTCGAT, TCAGCG, CATAGT, or ATCGAA of exon 5; CGTCGG or TCCGTC of exon 6; CGGCAA, CGGAGC, TACCGT, GCTTGC, or CTTGCT of exon 7; or GGTTCT or TCCTAC of exon 8 of the RHD gene.

[0036] In some embodiments, the deleterious variation of the FUT1 gene is generated using CRISPR-Cas9 gene editing comprising a guide RNA target sequence comprising one selected from the group consisting of those in Tables G-I.

[0037] In some embodiments, the deleterious variation comprises a deletion in exon 4 of the FUT1 gene and a guide RNA target sequence comprising SEQ ID NO:13 or SEQ ID NO:14.

[0038] In some embodiments, the deleterious variation of the FUT1 gene is a homozygous variation such that the cell has a Bombay phenotype.

[0039] In some embodiments, the deleterious variation of the RHD gene is generated by using CRISPR-Cas9 gene editing comprising one or more guide RNA target sequences comprising one or more selected from the group consisting of those in Tables D-F.

[0040] In some embodiments, the deleterious variation comprises a deletion of a genomic region comprising exons 1-8 of the RHD gene and a guide RNA target sequence comprising SEQ ID NO:11 and another guide RNA comprising SEQ ID NO:12.

[0041] In some embodiments, the deleterious variation of the RHD gene comprises a frame-shift insertion/deletion and a guide RNA target sequence comprises SEQ ID NO:9 or SEQ ID NO:10.

[0042] In some embodiments, the deleterious variation of the RHD gene is a homozygous variation such that the cell is Rhesus factor (Rh) negative.

[0043] In some embodiments, the deleterious variation of the RHD gene is a homozygous variation such that the cell has a Bombay phenotype and is Rh negative.

[0044] In some aspects, provided herein is an isolated cell in which expression of a FUT1 gene is partially or fully inactivated by a deleterious variation of the FUT1 gene. In some embodiments, the cell is further an Rh negative cell.

[0045] In some embodiments, expression of the FUT1 gene is partially or fully inactivated by an insertion or deletion within ATCGAC, AGTACG, CGCCCT, GTTTGC, CGACAA, GGTGCG, CGCCGT, ACGCCG, CCGGTT, CGCGGG, TTTTCG, ATACCG, GTGCGC, CCATTG, TGTCGG, ATCTGC, CTTTGT, GGGGCC, GGCCAT, TGCGAT, CGTGCA, or ATGGAC of exon 4 of the FUT1 gene.

[0046] In some embodiments, the deleterious variation of the FUT1 gene is generated using CRISPR-Cas9 gene editing comprising a guide RNA target sequence comprising one selected from the group consisting of those in Tables G-I.

[0047] In some embodiments, the deleterious variation comprises a deletion in exon 4 of the FUT1 gene and is generated using CRISPR-Cas9 gene editing comprising a guide RNA target sequence comprising SEQ ID NO:13 or SEQ ID NO:14.

[0048] In some embodiments, the deleterious variation of the FUT1 gene is a homozygous variation such that the cell is a universal Bombay negative cell.

[0049] In some aspects, provided herein is an isolated cell in which expression of an RHD gene is partially or fully inactivated by a deleterious variation of the RHD gene.

[0050] In some embodiments, the cell has a type O or Bombay phenotype.

[0051] In some embodiments, expression of the RHD gene is partially or fully inactivated by an insertion or deletion within TCATGG, GAGGTG, AACTCG, AGTTTC, TTGGCT, or CACAGC of exon 2; CCGTGA of exon 3; GGGTAG or AGGGAA of exon 4; TTCGAT, TCAGCG, CATAGT, or ATCGAA of exon 5; CGTCGG or TCCGTC of exon 6; CGGCAA, CGGAGC, TACCGT, GCTTGC, or CTTGCT of exon 7; or GGTTCT or TCCTAC of exon 8 of the RHD gene.

[0052] In some embodiments, the deleterious variation of the RHD gene is generated by using CRISPR-Cas9 gene editing comprising one or more guide RNA target sequences comprising one selected from the group consisting of those in Tables D-F.

[0053] In some embodiments, the deleterious variation comprises a deletion of a genomic region comprising exons 1-8 of the RHD gene and a guide RNA target sequence comprising SEQ ID NO:11 and another guide RNA comprising SEQ ID NO:12.

[0054] In some embodiments, the deleterious variation of the RHD gene comprises a frame-shift insertion/deletion and the guide RNA target sequence comprises SEQ ID NO:9 or SEQ ID NO:10.

[0055] In some embodiments, the deleterious variation of the RHD gene is a homozygous variation such that the cell is a type O negative cell or a Bombay negative cell.

[0056] In some aspects, provided herein is an isolated cell in which expression of an ABO gene is partially or fully inactivated by a deleterious variation of the ABO gene or by insertion of an exon 6 258delG variation of the ABO gene.

[0057] In some embodiments, expression of the ABO gene is partially or fully inactivated by an insertion or deletion within ACACCT of exon 1; AGTGCG of exon 2; or CAAGCGC, GGCGCA, TGGGCG, ACCACG, GCCGCA, CCACGT, TGCCGT, TACTCG, ACTCGG, GAGCGC, GCCTGG, GTCCTT, TCACGC, TGGACG, TGGTCG, GCTGGC, CACGCG, AGGTGA, or GCATCG of exon 8 of the ABO gene.

[0058] In some embodiments, the deleterious variation of the ABO gene is generated using CRISPR-Cas9 gene editing comprising a guide RNA target sequence comprising one selected from the group consisting of those in Tables A-C.

[0059] In some embodiments, the deleterious variation of the ABO gene comprises an insertion or deletion in a coding exon and the guide RNA target sequence comprises SEQ ID NO:1 or SEQ ID NO:2.

[0060] In some embodiments, the deleterious variation of the ABO gene comprises a frame-shift insertion/deletion and the guide RNA target sequence comprises SEQ ID NO:3.

[0061] In some embodiments, the deleterious variation of the ABO gene is a homozygous variation.

[0062] In some embodiments, the exon 6 258delG variation of the ABO gene is generated using CRISPR-Cas9 gene editing comprising a guide RNA target sequence comprising one selected from the group consisting of those in SEQ ID NOS:3-5 and a HDR template comprising a sequence encoding the 258delG variation, a PAM sequence, a spacer region, and two homology arms, each comprising about 10 nucleotides to about 1 Kb of homologous sequence to the ABO gene.

[0063] In some embodiments, the HDR template further comprises one or more silent mutations in the PAM sequence and/or the spacer region to ensure that the HDR template is not cleaved by Cas9.

[0064] In some embodiments, the exon 6 258delG variation of the ABO gene is generated using CRISPR-Cas9 gene editing comprising a guide RNA target sequence comprises one selected from the group consisting of SEQ ID NOS:3-5 and the HDR template comprises one selected from the group consisting of SEQ ID NOS:6-8.

[0065] In some embodiments, the exon 6 258delG variation of the ABO gene is a homozygous variation.

[0066] In some aspects, provided herein is an isolated cell in which expression of an RHD gene is partially or fully inactivated by a deleterious variation of the RHD gene.

[0067] In some embodiments, expression of the RHD gene is partially or fully inactivated by an insertion or deletion within TCATGG, GAGGTG, AACTCG, AGTTTC, TTGGCT, or CACAGC of exon 2; CCGTGA of exon 3; GGGTAG or AGGGAA of exon 4; TTCGAT, TCAGCG, CATAGT, or ATCGAA of exon 5; CGTCGG or TCCGTC of exon 6; CGGCAA, CGGAGC, TACCGT, GCTTGC, or CTTGCT of exon 7; or GGTTCT or TCCTAC of exon 8 of the RHD gene.

[0068] In some embodiments, the deleterious variation of the RHD gene is generated by using CRISPR-Cas9 gene editing comprising one or more guide RNA target sequences comprising one or more selected from the group consisting of those in Tables D-F.

[0069] In some embodiments, the deleterious variation comprises a deletion of a genomic region comprising exons 1-8 of the RHD gene and a guide RNA target sequence comprising SEQ ID NO:11 and another guide RNA comprising SEQ ID NO:12.

[0070] In some embodiments, the deleterious variation of the RHD gene comprises a frame-shift insertion/deletion and a guide RNA target sequence comprises SEQ ID NO:9 or SEQ ID NO:10.

[0071] In some embodiments, the deleterious variation of the RHD gene is a homozygous variation.

[0072] In some aspects, provided herein is an isolated cell in which expression of a FUT1 gene is partially or fully inactivated by a deleterious variation of the FUT1 gene.

[0073] In some embodiments, expression of the FUT1 gene is partially or fully inactivated by an insertion or deletion within ATCGAC, AGTACG, CGCCCT, GTTTGC, CGACAA, GGTGCG, CGCCGT, ACGCCG, CCGGTT, CGCGGG, TTTTCG, ATACCG, GTGCGC, CCATTG, TGTCGG, ATCTGC, CTTTGT, GGGGCC, GGCCAT, TGCGAT, CGTGCA, or ATGGAC of exon 4 of the FUT1 gene.

[0074] In some embodiments, the deleterious variation of the FUT1 gene is generated using CRISPR-Cas9 gene editing comprising a guide RNA target sequence comprising one selected from the group consisting of those in Tables G-I.

[0075] In some embodiments, the deleterious variation comprises a deletion in exon 4 of the FUT1 gene and a guide RNA target sequence comprising SEQ ID NO:13 or SEQ ID NO:14.

[0076] In some embodiments, the deleterious variation of the RHD gene is a homozygous variation.

[0077] In some embodiments, the cell is a human cell. In further embodiments, the cell is selected from the group consisting of an induced pluripotent stem cell, an embryonic stem cell (such as RUES2 or H9 cells), an adult stem cell, and a differentiated cell.

[0078] In some embodiments, the cell comprises one or more partially or fully inactivated genes encoding one or more transcriptional regulators of MHC-I and/or one or more partially or fully inactivated genes encoding one or more transcriptional regulators of MHC-II.

[0079] In some embodiments, expression of a B2M gene is partially or fully inactivated.

[0080] In some embodiments, expression of a CIITA gene is partially or fully inactivated.

[0081] In some embodiments, the cell further comprises a CD47 transgene.

[0082] In some embodiments, expression of the B2M and CIITA genes are partially or fully inactivated and the cell further comprises a CD47 transgene.

[0083] In some embodiments, provided herein is a pharmaceutical composition comprising a cell in accordance with any of the above.

[0084] In some embodiments, provided herein is a method for treating a patient in need to a cell replacement therapy comprising administering a cell in accordance with any of the above.

[0085] In some aspects, provided herein is a method of generating an engineered histocompatible cell, the method comprising: (a) obtaining an isolated cell; (b) introducing a Cas9 nuclease and a guide RNA target sequence for an ABO gene comprising one selected from the group consisting of those in Tables A-C into the cell; and (c) selecting an engineered cell in which the ABO gene is partially or fully inactivated.

[0086] In some embodiments, the guide RNA target sequence comprises one selected from the group consisting of SEQ ID NOS:1-3.

[0087] In some embodiments, the method further comprises the steps of (i) introducing a guide RNA target sequence for an RHD gene comprising one selected from the group consisting of those in Tables D-F into the cell; and (ii) selecting an engineered cell in which the RHD gene is partially or fully inactivated.

[0088] In some embodiments, the guide RNA target sequence comprising SEQ ID NO:11 and the another guide RNA comprising SEQ ID NO:12. In some embodiments, the guide RNA target sequence comprises SEQ ID NO:9 or SEQ ID NO:10.

[0089] In some further aspects, provided herein is a method of generating an engineered histocompatible cell, the method comprising: (a) obtaining an isolated cell; (b) introducing a Cas9 nuclease and a guide RNA target sequence for producing an exon 6 258delG variation of an ABO gene comprising one selected from the group consisting of those in SEQ ID NOS:3-5 and a HDR template comprising a sequence encoding the 258delG variation, a PAM sequence, a spacer region, and two homology arms, each comprising about 10 nucleotides to about 1 Kb of homologous sequence to the ABO gene into the cell; and (c) selecting an engineered cell in which the ABO gene is partially or fully inactivated.

[0090] In some embodiments, the HDR template further comprises one or more silent mutations in the PAM sequence and/or the spacer region to ensure that the HDR template is not cleaved by Cas9.

[0091] In some embodiments, the guide RNA target sequence comprises one selected from the group consisting of SEQ ID NOS:3-5 and the HDR template comprises one selected from the group consisting of SEQ ID NOS:6-8.

[0092] In some embodiments, the method of generating the engineered histocompatible cell further includes the steps of (i) introducing a guide RNA target sequence for an RHD gene comprising one selected from the group consisting of those in Tables D-F into the cell; and (ii) selecting an engineered cell in which the RHD gene is partially or fully inactivated.

[0093] In some embodiments, the guide RNA target sequence comprising SEQ ID NO:11 and the another guide RNA comprising SEQ ID NO:12.

[0094] In some embodiments, the guide RNA target sequence comprises SEQ ID NO:9 or SEQ ID NO:10.

[0095] In some aspects, provided herein is a method for generating an engineered histocompatible cell, the method comprising: (a) obtaining an isolated cell; (b) introducing a Cas9 nuclease and a guide RNA target sequence for an RHD gene comprising one selected from the group consisting of those in Tables D-F into the cell; and (c) selecting an engineered cell in which the RHD gene is partially or fully inactivated.

[0096] In some embodiments, the guide RNA target sequence comprising SEQ ID NO:11 and the another guide RNA comprising SEQ ID NO:12.

[0097] In some embodiments, the guide RNA target sequence comprises SEQ ID NO:9 or SEQ ID NO:10.

[0098] In some embodiments, the method for generating an engineered histocompatible cell further comprises the steps of: (i) introducing a guide RNA target sequence for an ABO gene comprising one selected from the group consisting of those in Tables A-C into the cell; and (ii) selecting an engineered cell in which the ABO gene is partially or fully inactivated. In some embodiments, the guide RNA target sequence comprises SEQ ID NOS:1-3.

[0099] In some embodiments, the method for generating an engineered histocompatible cell further comprises the steps of; (i) introducing a guide RNA target sequence for producing an exon 6 258delG variation of an ABO gene comprising one selected from the group consisting of those in SEQ ID NOS:3-5 and a HDR template comprising a sequence encoding the 258delG variation, a PAM sequence, a spacer region, and two homology arms, each comprising about 10 nucleotides to about 1 Kb of homologous sequence to the ABO gene into the cell; and (ii) selecting an engineered cell in which the ABO gene is partially or fully inactivated.

[0100] In some embodiments, the HDR template further comprises one or more silent mutations in the PAM sequence and/or the spacer region to ensure that the HDR template is not cleaved by Cas9.

[0101] In some embodiments, the guide RNA target sequence comprises one selected from the group consisting of SEQ ID NOS:3-5 and the HDR template comprises one selected from the group consisting of SEQ ID NOS:6-8. In some aspects, provided herein is a method of generating an engineered histocompatible cell, the method comprising: (a) obtaining an isolated cell; (b) introducing a Cas9 nuclease and a guide RNA target sequence for a FUT1 gene comprising one selected from the group consisting of those in Tables G-I into the cell; and (c) selecting an engineered cell in which the FUT1 gene is partially or fully inactivated.

[0102] In some embodiments, the guide RNA target sequence comprising SEQ ID NO:13 or SEQ ID NO:14.

[0103] In some embodiments, the method of generating an engineered histocompatible cell further comprises the steps of: (i) introducing a guide RNA target sequence for an RHD gene comprising one selected from the group consisting of those in Tables D-F into the cell; and (ii) selecting an engineered cell in which the RHD gene is partially or fully inactivated.

[0104] In some embodiments, the guide RNA target sequence comprises SEQ ID NO:9 or SEQ ID NO:10.

[0105] In some embodiments, the guide RNA target sequence comprises SEQ ID NO:11 and another guide RNA target sequence comprises SEQ ID NO:12.

[0106] In some embodiments, the isolated cell is an isolated human cell.

[0107] In some embodiments, the isolated cell is selected from the group consisting of a pluripotent stem cell, an induced pluripotent stem cell, an embryonic stem cell (such as RUES2 or H9 cells), a multipotent stem cell, an adult stem cell, and a differentiated cell.

[0108] In some embodiments, the isolated cell comprises one or more partially or fully inactivated genes encoding one or more transcriptional regulators of MHC-I and/or one or more partially or fully inactivated genes encoding one or more transcriptional regulators of MHC-II.

[0109] In some embodiments, the isolated cell comprises a partially or fully inactivated B2M gene.

[0110] In some further embodiments, the isolated cell used in accordance with the above method further comprises a partially or fully inactivated CIITA gene. In some further embodiments, the isolated cell comprises a CD47 transgene. In some further embodiments, the isolated cell comprises partially or fully inactivated B2M and CIITA genes and a CD47 transgene.

[0111] In some further aspects, provided herein is a method of preparing a differentiated cell, the method comprising culturing under differentiation conditions the stem cell prepared according to the above method, thereby preparing a differentiated cell. In some embodiments, the differentiation conditions are appropriate for differentiation of a stem cell into a cell type selected from the group consisting of cardiac cells, liver cell, kidney cells, pancreatic cells, neural cells, immune cells, mesenchymal cells, and endothelial cells.

[0112] In some further aspects, provided herein is a method of treating a patient in need of cell replacement therapy, the method comprising administering a population of differentiated cells prepared according to the above method.

[0113] In some aspects, provided herein is an isolated cell derived from a RUES2 cell line, wherein the isolated cell comprises one or both of: (a) a modification that renders the isolated cell histo-blood group O; and (b) a modification that renders the isolated cell Rh negative.

[0114] In some further embodiments, the modification that renders the isolated cell histo-blood group O reduces or eliminates antigenicity of the ABO histo-blood group B antigen.

[0115] In some further embodiments, wherein the modification comprises partially or fully inactivated expression of an ABO gene by a deleterious variation of the ABO gene or by insertion of an exon 6 258delG variation of the ABO gene.

[0116] In some further embodiments, expression of the ABO gene is partially or fully inactivated by an insertion or deletion within ACACCT of exon 1; AGTGCG of exon 2; or CAAGCGC, GGCGCA, TGGGCG, ACCACG, GCCGCA, CCACGT, TGCCGT, TACTCG, ACTCGG, GAGCGC, GCCTGG, GTCCTT, TCACGC, TGGACG, TGGTCG, GCTGGC, CACGCG, AGGTGA, or GCATCG of exon 8 of the ABO gene.

[0117] In some further embodiments, the deleterious variation of the ABO gene is generated using CRISPR-Cas9 gene editing comprising a guide RNA target sequence comprising one selected from the group consisting of those in Tables A-C.

[0118] In some further embodiments, the deleterious variation of the ABO gene comprises an insertion or deletion in a coding exon and the guide RNA target sequence comprises SEQ ID NO:1 or SEQ ID NO:2.

[0119] In some further embodiments, the deleterious variation of the ABO gene comprises a frame-shift insertion/deletion and the guide RNA target sequence comprises SEQ ID NO:3.

[0120] In some further embodiments, the deleterious variation of the ABO gene is a homozygous variation.

[0121] In some further embodiments, the exon 6 258delG variation of the ABO gene is generated using CRISPR-Cas9 gene editing comprising a guide RNA target sequence comprising one selected from the group consisting of those in SEQ ID NOS:3-5 and a HDR template comprising a sequence encoding the 258delG variation, a PAM sequence, a spacer region, and two homology arms, each comprising about 10 nucleotides to about 1 Kb of homologous sequence to the ABO gene.

[0122] In some further embodiments, the HDR template further comprises one or more silent mutations in the PAM sequence and/or the spacer region to ensure that the HDR template is not cleaved by Cas9.

[0123] In some further embodiments, wherein the exon 6 258delG variation of the ABO gene is generated using CRISPR-Cas9 gene editing comprising a guide RNA target sequence comprises one selected from the group consisting of SEQ ID NOS:3-5 and the HDR template comprises one selected from the group consisting of SEQ ID NOS:6-8.

[0124] In some further embodiments, the exon 6 258delG variation of the ABO gene is a homozygous variation.

[0125] In some further embodiments, the modification that renders the isolated cell Rh negative comprises partially or fully inactivated expression of a FUT1 gene by a deleterious variation of the FUT1 gene.

[0126] In some further embodiments, the expression of the FUT1 gene is partially or fully inactivated by an insertion or deletion within ATCGAC, AGTACG, CGCCCT, GTTTGC, CGACAA, GGTGCG, CGCCGT, ACGCCG, CCGGTT, CGCGGG, TTTTCG, ATACCG, GTGCGC, CCATTG, TGTCGG, ATCTGC, CTTTGT, GGGGCC, GGCCAT, TGCGAT, CGTGCA, or ATGGAC of exon 4 of the FUT1 gene.

[0127] In some further embodiments, the deleterious variation of the FUT1 gene is generated using CRISPR-Cas9 gene editing comprising a guide RNA target sequence comprising one selected from the group consisting of those in Tables G-I.

[0128] In some further embodiments, the deleterious variation comprises a deletion in exon 4 of the FUT1 gene and a guide RNA target sequence comprising SEQ ID NO:13 or SEQ ID NO:14.

[0129] In some further embodiments, the modification that renders the isolated cell Rh negative reduces or eliminates antigenicity of one or more Rhesus factor antigens.

[0130] In some further embodiments, the modification comprises partially or fully inactivated expression of an RHD gene by a deleterious variation of the RHD gene.

[0131] In some further embodiments, expression of the RHD gene is partially or fully inactivated by an insertion or deletion within TCATGG, GAGGTG, AACTCG, AGTTTC, TTGGCT, or CACAGC of exon 2; CCGTGA of exon 3; GGGTAG or AGGGAA of exon 4; TTCGAT, TCAGCG, CATAGT, or ATCGAA of exon 5; CGTCGG or TCCGTC of exon 6; CGGCAA, CGGAGC, TACCGT, GCTTGC, or CTTGCT of exon 7; or GGTTCT or TCCTAC of exon 8 of the RHD gene.

[0132] In some further embodiments, the deleterious variation of the RHD gene is generated by using CRISPR-Cas9 gene editing comprising one or more guide RNA target sequences comprising one selected from the group consisting of those in Tables D-F.

[0133] In some further embodiments, the deleterious variation comprises a deletion of a genomic region comprising exons 1-8 of the RHD gene and a guide RNA target sequence comprising SEQ ID NO:11 and another guide RNA comprising SEQ ID NO:12.

[0134] In some further embodiments, the deleterious variation of the RHD gene comprises a frame-shift insertion/deletion and the guide RNA target sequence comprises SEQ ID NO:9 or SEQ ID NO:10.

[0135] In some embodiments, the isolated cell described above further comprises one or more partially or fully inactivated genes encoding one or more transcriptional regulators of MHC-I and/or one or more partially or fully inactivated genes encoding one or more transcriptional regulators of MHC-II.

[0136] In some embodiments, the isolated cell comprises a partially or fully inactivated B2M gene. In some further embodiments, the isolated cell used in accordance with the above method further comprises a partially or fully inactivated CIITA gene. In some further embodiments, the isolated cell comprises a CD47 transgene. In some further embodiments, the isolated cell comprises partially or fully inactivated B2M and CIITA genes and a CD47 transgene.

[0137] In some aspects, provided herein is a method of generating an engineered histocompatible cell comprising: (a) obtaining an isolated RUES2 cell or a derivative thereof; (b) introducing a Cas9 nuclease and a guide RNA target sequence for an ABO gene comprising one selected from the group consisting of those in Tables A-C into the cell; and (c) selecting an engineered cell in which the ABO gene is partially or fully inactivated.

[0138] In some further embodiments, the guide RNA target sequence comprises one selected from the group consisting of SEQ ID NOS:1-3.

[0139] In some further embodiments, the method for generating the engineered histocompatible cell further comprises the steps of: (i) introducing a guide RNA target sequence for an RHD gene comprising one selected from the group consisting of those in Tables D-F into the cell; and (ii) selecting an engineered cell in which the RHD gene is partially or fully inactivated.

[0140] In some further embodiments, the guide RNA target sequence comprising SEQ ID NO:11 and the another guide RNA comprising SEQ ID NO:12.

[0141] In some further embodiments, the guide RNA target sequence comprises SEQ ID NO:9 or SEQ ID NO:10.

[0142] In some aspects, provided herein is a method of generating an engineered histocompatible cell, the method comprising: (a) obtaining an isolated RUES2 cell or a derivative thereof; (b) introducing a Cas9 nuclease and a guide RNA target sequence for producing an exon 6 258delG variation of an ABO gene comprising one selected from the group consisting of those in SEQ ID NOS:3-5 and a HDR template comprising a sequence encoding the 258delG variation, a PAM sequence, a spacer region, and two homology arms, each comprising about 10 nucleotides to about 1 Kb of homologous sequence to the ABO gene into the cell; and (c) selecting an engineered cell in which the ABO gene is partially or fully inactivated.

[0143] In some further embodiments, the HDR template further comprises one or more silent mutations in the PAM sequence and/or the spacer region to ensure that the HDR template is not cleaved by Cas9.

[0144] In some further embodiments, the guide RNA target sequence comprises one selected from the group consisting of SEQ ID NOS:3-5 and the HDR template comprises one selected from the group consisting of SEQ ID NOS:6-8.

[0145] In some further embodiments, the method further comprises the steps: (i) introducing a guide RNA target sequence for an RHD gene comprising one selected from the group consisting of those in Tables D-F into the cell; and (ii) selecting an engineered cell in which the RHD gene is partially or fully inactivated.

[0146] In some further embodiments, the guide RNA target sequence comprising SEQ ID NO:11 and the another guide RNA comprising SEQ ID NO:12.

[0147] In some further embodiments, the guide RNA target sequence comprises SEQ ID NO:9 or SEQ ID NO:10.

[0148] In some aspects, provided herein is a method of generating an engineered histocompatible cell comprising: (a) obtaining an isolated RUES2 cell or a derivative thereof; (b) introducing a Cas9 nuclease and a guide RNA target sequence for an RHD gene comprising one selected from the group consisting of those in Tables D-F into the cell; and (c) selecting an engineered cell in which the RHD gene is partially or fully inactivated.

[0149] In some further embodiments, the guide RNA target sequence comprising SEQ ID NO: 11 and the another guide RNA comprising SEQ ID NO:12.

[0150] In some further embodiments, the guide RNA target sequence comprises SEQ ID NO:9 or SEQ ID NO:10.

[0151] In some further embodiments, the method further comprises the steps of: (i) introducing a guide RNA target sequence for an ABO gene comprising one selected from the group consisting of those in Tables A-C into the cell; and (ii) selecting an engineered cell in which the ABO gene is partially or fully inactivated.

[0152] In some further embodiments, the guide RNA target sequence comprises SEQ ID NOS:1-3.

[0153] In some further embodiments, the method further comprises the steps of: (i) introducing a guide RNA target sequence for producing an exon 6 258delG variation of an ABO gene comprising one selected from the group consisting of those in SEQ ID NOS:3-5 and a HDR template comprising a sequence encoding the 258delG variation, a PAM sequence, a spacer region, and two homology arms, each comprising about 10 nucleotides to about 1 Kb of homologous sequence to the ABO gene into the cell; and (ii) selecting an engineered cell in which the ABO gene is partially or fully inactivated.

[0154] In some further embodiments, the HDR template further comprises one or more silent mutations in the PAM sequence and/or the spacer region to ensure that the HDR template is not cleaved by Cas9.

[0155] In some further embodiments, the guide RNA target sequence comprises one selected from the group consisting of SEQ ID NOS:3-5 and the HDR template comprises one selected from the group consisting of SEQ ID NOS:6-8.

[0156] In some aspects, provided herein is a method of generating an engineered histocompatible cell, the method comprising: (a) obtaining an isolated RUES2 cell or a derivative thereof; (b) introducing a Cas9 nuclease and a guide RNA target sequence for a FUT1 gene comprising one selected from the group consisting of those in Tables G-I into the cell; and (c) selecting an engineered cell in which the FUT1 gene is partially or fully inactivated.

[0157] In some further embodiments, the guide RNA target sequence comprising SEQ ID NO:13 or SEQ ID NO:14.

[0158] In some further embodiments, the method further includes the steps of (i) introducing a guide RNA target sequence for an RHD gene comprising one selected from the group consisting of those in Tables D-F into the cell; and (ii) selecting an engineered cell in which the RHD gene is partially or fully inactivated.

[0159] In some further embodiments, the guide RNA target sequence comprises SEQ ID NO:9 or SEQ ID NO:10.

[0160] In some further embodiments, the guide RNA target sequence comprises SEQ ID NO:11 and another guide RNA target sequence comprises SEQ ID NO:12.

[0161] In some further embodiments, the isolated cell further comprises one or more partially or fully inactivated genes encoding one or more transcriptional regulators of MHC-I and/or one or more partially or fully inactivated genes encoding one or more transcriptional regulators of MHC-II.

[0162] In some further embodiments, the isolated cell comprises a partially or fully inactivated B2M gene.

[0163] In some further embodiments, the isolated cell comprises a partially or fully inactivated CIITA gene.

[0164] In some further embodiments, the isolated cell comprises a CD47 transgene. In some further embodiments, the isolated cell comprises partially or fully inactivated B2M and CIITA genes and a CD47 transgene.

[0165] In some aspects, provided herein is a method of preparing a differentiated cell comprising culturing under differentiation conditions the engineered histocompatible cell prepared according to any of the methods described above, thereby preparing a differentiated cell.

[0166] In some further embodiments, the differentiation conditions are appropriate for differentiation of a stem cell into a cell type selected from the group consisting of cardiac cells, liver cell, kidney cells, pancreatic cells, neural cells, immune cells, mesenchymal cells, and endothelial cells.

[0167] In some aspects, provided herein is a method of treating a patient in need of cell replacement therapy comprising administering a population of differentiated cells prepared according to any of the methods described above.

[0168] Detailed descriptions of hypoimmunogenic cells, methods of producing thereof, and methods of using thereof are found in WO2016183041 filed May 9, 2015 and WO2018132783 filed Jan. 14, 2018, the disclosures including the sequence listings and Figures are incorporated herein by reference in their entirety.

[0169] Other objects, advantages and embodiments of the invention will be apparent from the detailed description following.

### BRIEF DESCRIPTION OF THE DRAWINGS

[0170] FIG. 1 shows exemplary embodiments of a universal O negative iPSCs.

[0171] FIG. 2 shows exemplary genome modification strategies for the ABO gene that can be used to generate universal O negative cells.

[0172] FIG. 3 shows exemplary genome modification strategies for the RHD gene that can be used to generate universal O negative cells.

[0173] FIG. 4 shows 3 HDR strategies to produce c.258delG ABO genotypes.

[0174] FIGS. 5A-5AE show exemplary ABO target sequences and the genomic structure of the ABO gene.

[0175] FIGS. 6A-6C show exemplary ABO 238delG donor templates and guide RNA target sequences.

[0176] FIGS. 7A-7K show exemplary FUT1 target sequences and the genomic structure of the FUT1 gene.

[0177] FIGS. 8A-8BR show exemplary RHD target sequences and the genomic structure of the RHD gene.

[0178] FIG. 9 shows Table A of exemplary ABO gRNA target sequences.

[0179] FIGS. 10A-10E show Table B of exemplary ABO gRNA target sequences to target coding exons.

[0180] FIGS. 11A-BZ show Table C of ABO gRNA target sequences.

[0181] FIG. 12 shows Table D of exemplary RHD gRNA target sequences.

[0182] FIGS. 13A-13D show Table E of exemplary RHD gRNA target sequences to target coding exons.

[0183] FIGS. 14A-14FE show Table F of RHD gRNA target sequences.

[0184] FIG. 15 shows Table G of exemplary FUT1 gRNA target sequences.

[0185] FIG. 16A-16L show Table H of exemplary FUT1 gRNA target sequences to target coding exons.

[0186] FIGS. 17A-17AD show Table I of FUT1 gRNA target sequences.

[0187] FIG. 18 shows RUES2-cardiomyocytes survival when incubated with blood type matched monkey serum, and rejection when incubated with mismatched blood.

### DETAILED DESCRIPTION OF THE INVENTION

### I. Introduction

[0188] This invention is based, in part, on methods to genetically modify cells to produce a histo-blood antigen type suitable for universal transplantation. Described are methods of gene editing of ABO, RHD and FUT1 genes to produce universal histo-blood type cells. In some embodiments, cells harboring such gene modifications also carry gene alterations in genes regulating expression of MHC I and/or MHC II antigens. The cells outlined herein can improve and facilitate implementation and delivery of cellular therapies to patients.

### II. Definitions

[0189] As used herein, “immunogenicity” refers to property that allows a substance to induce a detectable immune response (humoral or cellular) when introduced into a subject (e.g., a human subject).

[0190] As used herein to characterize a cell, the term “hypoimmunogenic” generally means that such cell is less prone to immune rejection by a subject into which such cells are transplanted. For example, relative to an unaltered or unmodified wild-type cell, such a hypoimmunogenic cell may be about 2.5%, 5%, 10%, 20%, 30%, 40%, 50%, 60%, 70%, 80%, 90%, 95%, 97.5%, 99% or more less prone to immune rejection by a subject into which such cells are transplanted. In some aspects, genome editing technologies are used to modulate the expression of MHC I and MHC II genes, and thus, generate a hypoimmunogenic cell. In some embodiments, a hypoimmunogenic cell evades immune rejection in an MHC-mismatched allogenic recipient. In some instance, differentiated cells produced from the hypoimmunogenic stem cells outlined herein evade immune rejection when administered (e.g., transplanted or grafted) to an MHC-mismatched allogenic recipient. In some embodiments, a hypoimmunogenic cell is protected from T cell-mediated adaptive immune rejection and/or innate immune cell rejection.

[0191] Hypoimmunogencity of a cell can be determined by evaluating the immunogenicity of the cell such as the cell's ability to elicit adaptive and innate immune responses. Such immune response can be measured using assays recognized by those skilled in the art. In some embodiments, an immune response assay measures the effect of a hypoimmunogenic cell on T cell proliferation, T cell activation, T cell killing, NK cell proliferation, NK cell activation, and macrophage activity. In some cases, hypoimmunogenic cells and derivatives thereof undergo decreased killing by T cells and/or NK cells upon administration to a subject. In some instances, the cells and derivatives thereof show decreased macrophage engulfment compared to an unmodified or wildtype cell. In some embodiments, a hypoimmunogenic cell elicits a reduced or diminished immune response in a recipient subject compared to a corresponding unmodified wild-type cell. In some embodiments, a hypoimmunogenic cell is nonimmunogenic or fails to elicit an immune response in a recipient subject.

[0192] By “HLA” or “human leukocyte antigen” complex is a gene complex encoding the major histocompatibility complex (MHC) proteins in humans. These cell-surface proteins that make up the HLA complex are responsible for the regulation of the immune response to antigens. In humans, there are two MHCs, class I and class II, “HLA-I” and “HLA-II”. HLA-I includes three proteins, HLA-A, HLA-B and HLA-C, which present peptides from the inside of the cell, and antigens presented by the HLA-I complex attract killer T cells (also known as CD8+ T cells or cytotoxic T cells). The HLA-I proteins are associated with β-2 microglobulin (B2M). HLA-II includes five proteins, HLA-DP, HLA-DM, HLA-DOB, HLA-DQ and HLA-DR, which present antigens from outside the cell to T lymphocytes. This stimulates CD4+ cells (also known as T-helper cells). It should be understood that the use of either “MHC” or “HLA” is not meant to be limiting, as it depends on whether the genes are from humans (HLA) or murine (MHC). Thus, as it relates to mammalian cells, these terms may be used interchangeably herein.

[0193] As used herein, the terms “evade rejection,” “escape rejection,” “avoid rejection,” and similar terms are used interchangeably to refer to genetically or otherwise modified membranous products and cells according to the invention that are less susceptible to rejection when transplanted into a subject when compared with corresponding products and cells that are not genetically modified according to the invention. In some embodiments, the genetically modified products and cells according to the invention are less susceptible to rejection when transplanted into a subject when compared with corresponding cells that are ABO blood group or Rh factor mismatched to the subject.

[0194] By “allogeneic” herein is meant the genetic dissimilarity of a host organism and a cellular transplant where an immune cell response is generated.

[0195] The term “pluripotent cells” refers to cells that can self-renew and proliferate while remaining in an undifferentiated state and that can, under the proper conditions, be induced to differentiate into specialized cell types. The term “pluripotent cells,” as used herein, encompass embryonic stem cells and other types of stem cells, including fetal, amnionic, or somatic stem cells. Exemplary human stem cell lines include the H9 human embryonic stem cell line, RUES2 human embryonic stem cell line, and the like. Additional exemplary stem cell lines include those made available through the National Institutes of Health Human Embryonic Stem Cell Registry and the Howard Hughes Medical Institute HUES collection, (as described in Cowan, C. A. et. al, New England J. Med. 350:13. (2004), incorporated by reference herein in its entirety. “Pluripotent stem cells” as used herein have the potential to differentiate into any of the three germ layers: endoderm (e.g., the stomach linking, gastrointestinal tract, lungs, etc.), mesoderm (e.g., muscle, bone, blood, urogenital tissue, etc.) or ectoderm (e.g. epidermal tissues and nervous system tissues). The term “pluripotent stem cells,” as used herein, also encompasses “induced pluripotent stem cells”, or “iPSCs”, a type of pluripotent stem cell derived from a non-pluripotent cell. Examples of parent cells include somatic cells that have been reprogrammed to induce a pluripotent, undifferentiated phenotype by various means. Such “iPS” or “iPSC” cells can be created by inducing the expression of certain regulatory genes or by the exogenous application of certain proteins. Methods for the induction of iPS cells are known in the art and are further described below. (See, e.g., Zhou et al., Stem Cells 27 (11): 2667-74 (2009); Huangfu et al, Nature Biotechnol. 26 (7): 795 (2008); Woltjen et al., Nature 458 (7239): 766-770 (2009); and Zhou et al., Cell Stem Cell 8:381-384 (2009); each of which is incorporated by reference herein in their entirety.) The generation of induced pluripotent stem cells (iPSCs) is outlined below. As used herein, “hiPSCs” are human induced pluripotent stem cells.

[0196] Several characteristics of pluripotent stem cells distinguish them from other cells. For example, the ability to give rise to progeny that can undergo differentiation, under the appropriate conditions, into cell types that collectively demonstrate characteristics associated with cell lineages from all of the three germinal layers (e.g., endoderm, mesoderm, and ectoderm) is a pluripotent stem cell characteristic. Expression or non-expression of certain combinations of molecular markers are also pluripotent stem cell characteristics. For example, human pluripotent stem cells express at least several, and in some embodiments, all of the markers from the following non-limiting list: SSEA-3, SSEA-4, TRA-1-60, TRA-1-81, TRA-2-49/6E, ALP, Sox2, E-cadherin, UTF-1, Oct4, Rex1, and Nanog. Cell morphologies associated with pluripotent stem cells are also pluripotent stem cell characteristics. Cells do not need to pass through pluripotency to be reprogrammed into endodermal progenitor cells and/or hepatocytes.

[0197] As used herein, “non-pluripotent cells” refer to mammalian cells that are not pluripotent cells. Examples of such cells include differentiated cells as well as progenitor cells. Examples of differentiated cells include, but are not limited to, cells from a tissue selected from bone marrow, skin, skeletal muscle, fat tissue and peripheral blood. Exemplary cell types include, but are not limited to, fibroblasts, hepatocytes, myoblasts, neurons, osteoblasts, osteoclasts, and T cells. The starting cells employed for generating the induced multipotent cells, the endodermal progenitor cells, and the hepatocytes can be non-pluripotent cells.

[0198] As used herein, “multipotent” or “multipotent cell” refers to a cell type that can give rise to a limited number of other particular cell types. For example, induced multipotent cells are capable of forming endodermal cells. Additionally, multipotent blood stem cells can differentiate itself into several types of blood cells, including lymphocytes, monocytes, neutrophils, etc.

[0199] Differentiated cells include, but are not limited to, multipotent cells, oligopotent cells, unipotent cells, progenitor cells, and terminally differentiated cells. In particular embodiments, a less potent cell is considered “differentiated” in reference to a more potent cell.

[0200] A “somatic cell” is a cell forming the body of an organism. Somatic cells include cells making up organs, skin, blood, bones and connective tissue in an organism, but not germ cells. Somatic cell as used herein includes but is not limited to cardiac cells, liver cell, kidney cells, pancreatic cells, neural cells, glial cells, immune cells, mesenchymal cells, epithelial cells, and endothelial cells.

[0201] In some embodiments, the term “immune cell” as used herein includes immune effector cells, e.g., as described herein. Exemplary immune effector cells include T cells, e.g., alpha/beta T cells and gamma/delta T cells, B cells, natural killer (NK) cells, natural killer T (NKT) cells, mast cells, myeloid-derived phagocytes, or a combination thereof.

[0202] By “hypoimmunogenic pluripotent cell,” “hypoimmune pluripotent cell” or “HIP cell” herein is meant a pluripotent cell that retains its pluripotent characteristics and yet gives rise to a reduced immunological rejection response when transferred into an allogeneic host. In preferred embodiments, HIP cells do not give rise to an immune response. Thus, “hypo-immunogenic” refers to a significantly reduced or eliminated immune response when compared to the immune response of a parental (i.e. “wt”) cell prior to immunoengineering as outlined herein. In many cases, the HIP cells are immunologically silent and yet retain pluripotent capabilities. Assays for HIP characteristics are outlined below.

[0203] By “wild type” or “wt” in the context of a cell means a cell found in nature. However, in the context of a pluripotent stem cell, as used herein, it also means an iPSC that may contain nucleic acid changes resulting in pluripotency but did not undergo the gene editing procedures of the invention to achieve hypo-immunogenicity.

[0204] The terms “treat”, “treating”, “treatment”, etc., as applied to an isolated cell, include subjecting the cell to any kind of process or condition or performing any kind of manipulation or procedure on the cell. As applied to a subject, the terms refer to administering a cell or population of cells in which a target polynucleotide sequence (e.g., B2M) has been altered ex vivo according to the methods described herein to an individual. The individual is usually ill or injured, or at increased risk of becoming ill relative to an average member of the population and in need of such attention, care, or management.

[0205] As used herein, the term “treating” and “treatment” refers to administering to a subject an effective amount of cells with target polynucleotide sequences altered ex vivo according to the methods described herein so that the subject has a reduction in at least one symptom of the disease or an improvement in the disease, for example, beneficial or desired clinical results. For purposes of this invention, beneficial or desired clinical results include, but are not limited to, alleviation of one or more symptoms, diminishment of extent of disease, stabilized (i.e., not worsening) state of disease, delay or slowing of disease progression, amelioration or palliation of the disease state, and remission (whether partial or total), whether detectable or undetectable. Treating can refer to prolonging survival as compared to expected survival if not receiving treatment. Thus, one of skill in the art realizes that a treatment may improve the disease condition, but may not be a complete cure for the disease. As used herein, the term “treatment” includes prophylaxis. Alternatively, treatment is “effective” if the progression of a disease is reduced or halted. “Treatment” can also mean prolonging survival as compared to expected survival if not receiving treatment. Those in need of treatment include those already diagnosed with a disorder associated with expression of a polynucleotide sequence, as well as those likely to develop such a disorder due to genetic susceptibility or other factors.

[0206] By “treatment” or “prevention” of a disease or disorder is meant delaying or preventing the onset of such a disease or disorder, reversing, alleviating, ameliorating, inhibiting, slowing down or stopping the progression, aggravation or deterioration the progression or severity of a condition associated with such a disease or disorder. In one embodiment, the symptoms of a disease or disorder are alleviated by at least 5%, at least 10%, at least 20%, at least 30%, at least 40%, or at least 50%.

[0207] As used herein, the terms “administering,” “introducing” and “transplanting” are used interchangeably in the context of the placement of cells, e.g. cells described herein comprising a target polynucleotide sequence altered according to the methods of the invention into a subject, by a method or route which results in at least partial localization of the introduced cells at a desired site. The cells can be implanted directly to the desired site, or alternatively be administered by any appropriate route which results in delivery to a desired location in the subject where at least a portion of the implanted cells or components of the cells remain viable. The period of viability of the cells after administration to a subject can be as short as a few hours, e. g. twenty-four hours, to a few days, to as long as several years. In some instances, the cells can also be administered a location other than the desired site, such as in the liver or subcutaneously, for example, in a capsule to maintain the implanted cells at the implant location and avoid migration of the implanted cells.

[0208] The term “effective amount” as used herein means an amount of a pharmaceutical composition which is sufficient enough to significantly and positively modify the symptoms and/or conditions to be treated (e.g., provide a positive clinical response). The effective amount of an active ingredient for use in a pharmaceutical composition will vary with the particular condition being treated, the severity of the condition, the duration of treatment, the nature of concurrent therapy, the particular active ingredient(s) being employed, the particular pharmaceutically-acceptable excipient(s) and/or carrier(s) utilized, and like factors with the knowledge and expertise of the attending physician.

[0209] The term “pharmaceutically acceptable” as used herein, refers to excipients, compositions and/or dosage forms which are, within the scope of sound medical judgment, suitable for use in contact with the tissues of human beings and animals without excessive toxicity, irritation, allergic response, or other problem or complication, commensurate with a reasonable benefit/risk ratio.

[0210] The RNA molecule that binds to CRISPR-Cas components and targets them to a specific location within the target DNA is referred to herein as “guide RNA,” “gRNA,” or “small guide RNA” and may also be referred to herein as a “DNA-targeting RNA.” A guide RNA comprises at least two nucleotide segments: at least one “DNA-binding segment” and at least one “polypeptide-binding segment.” By “segment” is meant a part, section, or region of a molecule, e.g., a contiguous stretch of nucleotides of an RNA molecule. The definition of “segment,” unless otherwise specifically defined, is not limited to a specific number of total base pairs. In some embodiments, the targeting is accomplished through hybridization of a portion of the gRNA to DNA (e.g., through the gRNA targeting domain), and by binding of a portion of the gRNA molecule to the RNA-guided nuclease or other effector molecule (e.g., through at least the gRNA tracr). In some embodiments, a gRNA molecule consists of a single contiguous polynucleotide molecule, referred to herein as a “single guide RNA” or “sgRNA” and the like. In other embodiments, a gRNA molecule includes a plurality, usually two, polynucleotide molecules, which are themselves capable of association, usually through hybridization, referred to herein as a “dual guide RNA” or “dgRNA,” and the like. gRNA molecules are described in more detail below, and generally include a targeting domain and a tracr. In other embodiments the targeting domain and tracr are disposed on a single polynucleotide. The guide RNA can be introduced into the target cell as an isolated RNA molecule, or is introduced into the cell using an expression vector containing DNA encoding the guide RNA.

[0211] The term “guide RNA target” as used herein includes an RNA sequence of each and any of the guide RNA targets described herein and variants thereof which are utilized for gene editing. In some embodiment, the guide RNA target includes a target sequence to which a guide RNA binds, thereby allowing for gene editing of the target sequence. The guide RNA target can correspond to a target sequence and does not include a PAM sequence.

[0212] The “DNA-binding segment” (or “DNA-targeting sequence”) of the guide RNA comprises a nucleotide sequence that is complementary to a specific sequence within a target DNA.

[0213] The guide RNA can include one or more polypeptide-binding sequences/segments. The polypeptide-binding segment (or “protein-binding sequence”) of the guide RNA interacts with the RNA-binding domain of a Cas protein.

[0214] The term “Cas9 molecule,” as used herein, refers to Cas9 wild-type proteins derived from Type II CRISPR-Cas9 systems, modifications of Cas9 proteins, variants of Cas9 proteins, Cas9 orthologs, and combinations thereof.

[0215] The term “donor polynucleotide,” “donor template” and “donor oligonucleotide” are used interchangeably and refer to a polynucleotide that provides a nucleic acid sequence of which at least a portion is intended to be integrated into a selected nucleic acid target site. Generally speaking, a donor polynucleotide is a single-strand polynucleotide or a double-strand polynucleotide. For example, an engineered Type II CRISPR-Cas9 system can be used in combination with a donor DNA template to modify a DNA target sequence in a genomic DNA wherein the genomic DNA is modified to comprise at least a portion of the donor DNA template at the DNA target sequence. In some embodiments, a vector comprises a donor polynucleotide In other embodiments, a donor polynucleotide is an oligonucleotide.

[0216] The term “HDR”, as used herein, refers to homology-directed repair, as used herein, refers to the process of repairing DNA damage using a homologous nucleic acid (e.g., an endogenous homologous sequence, e.g., a sister chromatid, or an exogenous nucleic acid, e.g., a template nucleic acid). HDR typically acts when there has been significant resection at the double strand break, forming at least one single stranded portion of DNA. In a normal cell, HDR typically involves a series of steps such as recognition of the break, stabilization of the break, resection, stabilization of single stranded DNA, formation of a DNA crossover intermediate, resolution of the crossover intermediate, and ligation. In some cases, HDR requires nucleotide sequence homology and uses a donor template (e.g., a donor DNA template) or donor oligonucleotide to repair the sequence wherein the double-strand break occurred (e.g., DNA target sequence). This results in the transfer of genetic information from, for example, the donor template DNA to the DNA target sequence. HDR may result in alteration of the DNA target sequence (e.g., insertion, deletion, mutation) if the donor template DNA sequence or oligonucleotide sequence differs from the DNA target sequence and part or all of the donor template DNA polynucleotide or oligonucleotide is incorporated into the DNA target sequence. In some embodiments, an entire donor template DNA polynucleotide, a portion of the donor template DNA polynucleotide, or a copy of the donor polynucleotide is integrated at the site of the DNA target sequence.

[0217] The term “non-homologous end joining” or “NHEJ”, as used herein, refers to ligation mediated repair and/or non-template mediated repair.

[0218] The methods of the present invention can be used to alter a target polynucleotide sequence in a cell. The present invention contemplates altering target polynucleotide sequences in a cell for any purpose. In some embodiments, the target polynucleotide sequence in a cell is altered to produce a mutant cell. As used herein, a “mutant cell” refers to a cell with a resulting genotype that differs from its original genotype. In some instances, a “mutant cell” exhibits a mutant phenotype, for example when a normally functioning gene is altered using the CRISPR/Cas systems of the present invention. In other instances, a “mutant cell” exhibits a wild-type phenotype, for example when a CRISPR/Cas system of the present invention is used to correct a mutant genotype. In some embodiments, the target polynucleotide sequence in a cell is altered to correct or repair a genetic mutation (e.g., to restore a normal phenotype to the cell). In some embodiments, the target polynucleotide sequence in a cell is altered to induce a genetic mutation (e.g., to disrupt the function of a gene or genomic element).

[0219] In some embodiments, the alteration is an indel. As used herein, “indel” refers to a mutation resulting from an insertion, deletion, or a combination thereof. As will be appreciated by those skilled in the art, an indel in a coding region of a genomic sequence will result in a frameshift mutation, unless the length of the indel is a multiple of three. In some embodiments, the alteration is a point mutation. As used herein, “point mutation” refers to a substitution that replaces one of the nucleotides. A CRISPR/Cas system of the present invention can be used to induce an indel of any length or a point mutation in a target polynucleotide sequence.

[0220] As used herein, “knock out” includes deleting all or a portion of the target polynucleotide sequence in a way that interferes with the function of the target polynucleotide sequence. For example, a knock out can be achieved by altering a target polynucleotide sequence by inducing an indel in the target polynucleotide sequence in a functional domain of the target polynucleotide sequence (e.g., a DNA binding domain). Those skilled in the art will readily appreciate how to use the CRISPR/Cas systems of the present invention to knock out a target polynucleotide sequence or a portion thereof based upon the details described herein.

[0221] The process of a “gene knock-out” renders a particular gene inactive in the host cell in which it resides, resulting either in no protein of interest being produced or an inactive form. As will be appreciated by those in the art and further described below, this can be accomplished in a number of different ways, including removing nucleic acid sequences from a gene, or interrupting the sequence with other sequences, altering the reading frame, or altering the regulatory components of the nucleic acid. For example, all or part of a coding region of the gene of interest can be removed or replaced with “nonsense” sequences, all or part of a regulatory sequence such as a promoter can be removed or replaced, translation initiation sequences can be removed or replaced, etc.

[0222] In some embodiments, the alteration results in a knock out of the target polynucleotide sequence or a portion thereof. Knocking out a target polynucleotide sequence or a portion thereof using a CRISPR/Cas system of the present invention can be useful for a variety of applications. For example, knocking out a target polynucleotide sequence in a cell can be performed in vitro for research purposes. For ex vivo purposes, knocking out a target polynucleotide sequence in a cell can be useful for treating or preventing a disorder associated with expression of the target polynucleotide sequence (e.g., by knocking out a mutant allele in a cell ex vivo and introducing those cells comprising the knocked out mutant allele into a subject).

[0223] By “knock in” herein is meant a process that adds a genetic function to a host cell. This causes increased levels of the encoded protein. As will be appreciated by those in the art, this can be accomplished in several ways, including adding one or more additional copies of the gene to the host cell or altering a regulatory component of the endogenous gene increasing expression of the protein is made. This may be accomplished by modifying the promoter, adding a different promoter, adding an enhancer, or modifying other gene expression sequences.

[0224] As used herein, a “vector” or “vectors” refer to tools that allow or facilitate the transfer of an entity from one environment to another.

[0225] The term “packaging cell” as used herein includes a cell which contains some or all of the elements necessary for packaging an infectious recombinant virus or viral vector. The packaging cell may lack a recombinant viral vector. Typically, such packaging cells contain one or more vectors which are capable of expressing viral structural proteins. Cells comprising only some of the elements required for the production of enveloped viral particles are useful as intermediate reagents in the generation of viral particle producer cell lines, through subsequent steps of transient transfection, transduction or stable integration of each additional required element. These intermediate reagents are encompassed by the term “packaging cell.”

[0226] As used herein, “viral particles” refer to replication-competent or -defective viruses, viral vectors derived therefrom, and which may or may not comprise a nucleotide of interest.

[0227] An “enveloped virus” refers to a virus containing a proteinaceous viral envelope which surrounds the viral capsid. Such enveloped viruses include orthomyxoviruses and paramyxovirus, herpes viruses, togaviruses, lentiviruses, and retroviruses. During cell infection by an enveloped virus, the plasma membrane of the host cell is altered to include some viral-coded proteins and, as the viral nucleoprotein core exits the host cell in which it was assembled, it becomes enveloped with the modified membrane, thus forming the viral envelope.

[0228] Lentivirus vectors are part of the larger group of retroviral vectors. A detailed list of lentiviruses may be found in Coffin, J. M. et al. (1997) Retroviruses, Cold Spring Harbor Laboratory Press, 758-63. Lentiviruses can be divided into primate and non-primate groups. Examples of primate lentiviruses include but are not limited to human immunodeficiency virus (HIV), the causative agent of human acquired immunodeficiency syndrome (AIDS); and simian immunodeficiency virus (SIV). Examples of non-primate lentiviruses include the prototype “slow virus” visna/maedi virus (VMV), as well as the related caprine arthritis-encephalitis virus (CAEV), equine infectious anaemia virus (EIAV), and the more recently described feline immunodeficiency virus (FIV) and bovine immunodeficiency virus (BIV).

[0229] The lentivirus family differs from retroviruses in that lentiviruses have the capability to infect both dividing and non-dividing cells (Lewis, P. et al. (1992) EMBO J 11: 3053-8; Lewis, P. F. et al. (1994) J. Virol. 68: 510-6). In contrast, other retroviruses, such as MLV, are unable to infect non-dividing or slowly dividing cells such as those that make up, for example, muscle, brain, lung and liver tissue.

[0230] The lentiviral vector may be a “primate” vector. The lentiviral vector may be a “non-primate” vector (i.e. derived from a virus which does not primarily infect primates, especially humans). Examples of non-primate lentiviruses may be any member of the family of lentiviridae which does not naturally infect a primate.

[0231] In some embodiments, the lentiviral vector is a pseudotyped lentiviral vector. Pseudotyped lentiviral vectors comprise vector particles bearing glycoproteins from other enveloped viruses. Pseudotyping is a mechanism for expanding the cellular tropism of enveloped viruses through the formation of phenotypically mixed particles or pseudotypes. In some embodiments, the vector may be pseudotyped with a fusogenic envelope G glycoprotein of the vesicular stomatitis virus (VSV-G). Pseudotyped proteins may also be derived from rabies virus, MLV, Ebola, baculovirus, paramyxoviruses (e.g., measles virus, Hendra virus, Nipah virus), and filovirus.

[0232] In some embodiments, the lentiviral vector is an HIV-1 or HIV-2 based vector. The HIV-1 vector contains cis-acting elements that are also found in simple retroviruses. It has been shown that sequences that extend into the gag open reading frame are important for packaging of HIV-1. Therefore, HIV-1 vectors often contain the relevant portion of gag in which the translational initiation codon has been mutated. In addition, most HIV-1 vectors also contain a portion of the env gene that includes the RRE. Rev binds to RRE, which permits the transport of full-length or singly spliced mRNAs from the nucleus to the cytoplasm. In the absence of Rev and/or RRE, full-length HIV-1 RNAs accumulate in the nucleus. Alternatively, a constitutive transport element from certain simple retroviruses such as Mason-Pfizer monkey virus can be used to relieve the requirement for Rev and RRE. Efficient transcription from the HIV-1 LTR promoter requires the viral protein Tat. Most HIV-2-based vectors are structurally very similar to HIV-1 vectors. Similar to HIV-1-based vectors, HIV-2 vectors also require RRE for efficient transport of the full-length or singly spliced viral RNAs. HIV-derived vectors for use in the present invention are not limited in terms of HIV strain.

[0233] In some embodiments, the plasmid vector used to produce the viral genome within a host cell/packaging cell will have sufficient lentiviral genetic information to allow packaging of an RNA genome, in the presence of packaging components, into a viral particle which is capable of infecting a target cell, but is incapable of independent replication to produce infectious viral particles within the final target cell. In a preferred embodiment, the vector lacks a functional gag-pol and/or env gene and/or other genes essential for replication. In some embodiments, the plasmid vector includes transcriptional regulatory control sequences operably linked to the lentiviral genome to direct transcription of the genome in a host cell/packaging cell. These regulatory sequences may be the natural sequences associated with the transcribed viral sequence (i.e. the 5′ U3 region), or they may be a heterologous promoter, such as another viral promoter (e.g. the CMV promoter).

[0234] In some embodiments, the vectors are integration-defective. Integration defective lentiviral vectors (IDLVs) can be produced, for example, either by packaging the vector with catalytically inactive integrase (such as an HIV integrase bearing the D64V mutation in the catalytic site; Naldini, L. et al. (1996) Science 272: 263-7; Naldini, L. et al. (1996) Proc. Natl. Acad. Sci. USA 93: 11382-8; Leavitt, A. D. et al. (1996) J. Virol. 70: 721-8) or by modifying or deleting essential att sequences from the vector LTR (Nightingale, S. J. et al. (2006) Mol. Ther. 13: 1121-32), or by a combination of the above.

[0235] In some embodiments, the lentiviral vector is a herpes simplex virus (HSV). Herpes simplex virus (HSV) is an enveloped double-stranded DNA virus that naturally infects neurons. HSV can accommodate large sections of foreign DNA, which makes it attractive as a vector system, and has been employed as a vector for gene delivery to neurons. The use of HSV in therapeutic procedures requires the strains to be attenuated so that they cannot establish a lytic cycle. If HSV vectors are to be used for gene therapy in humans, the gene of interest is preferably inserted into an essential gene. This is necessary, because if a vector virus encounters a wild type virus, transfer of a heterologous gene to the wild type virus could occur by recombination. However, as long as the NOI is inserted into an essential gene, recombinational transfer would also delete the essential gene in the recipient virus and prevent “escape” of the heterologous gene into the replication competent wild type virus population.

[0236] In other embodiments, the lentiviral vector is a vaccinia virus derived vector. Vaccinia virus is large enveloped virus that has an approximately 190 kb linear, double-stranded DNA genome. Vaccinia virus can accommodate up to approximately 25 kb of foreign DNA, which also makes it useful for the delivery of large genes. A number of attenuated vaccinia virus strains are known in the art that are suitable for gene therapy applications, for example the MVA and NYVAC strains.

[0237] A “nucleic acid,” “nucleic acid molecule,” “oligonucleotide” or “polynucleotide” means a polymeric compound comprising covalently linked nucleotides. The term “nucleic acid” includes polyribonucleic acid (RNA) and polydeoxyribonucleic acid (DNA), both of which may be single- or double-stranded. DNA includes, but is not limited to, complimentary DNA (cDNA), genomic DNA, plasmid or vector DNA, and synthetic DNA.

[0238] A “gene” refers to an assembly of nucleotides that encode a polypeptide, and includes cDNA and genomic DNA nucleic acid molecules. “Gene” also refers to a nucleic acid fragment that can act as a regulatory sequences preceding (5′ non-coding sequences) and following (3′ non-coding sequences) the coding sequence.

[0239] The terms “peptide,” “polypeptide,” and “protein” are used interchangeably herein, and refer to a polymeric form of amino acids of any length, which can include coded and non-coded amino acids, chemically or biochemically modified or derivatized amino acids, and polypeptides having modified peptide backbones.

[0240] An “amino acid” as used herein refers to a compound containing both a carboxyl (—COON) and amino (—NH.sub.2) group. “Amino acid” refers to both natural and unnatural, i.e., synthetic, amino acids. Natural amino acids, with their three-letter and single letter abbreviations, include Alanine (Ala; A); Arginine (Arg, R); Asparagine (Asn; N); Aspartic acid (Asp; D); Cysteine (Cys; C); Glutamine (Gln; Q); Glutamic acid (Glu; E); Glycine (Gly; G); Histidine (His; H); Isoleucine (Ile; I); Leucine (Leu; L); Lysine (Lys; K); Methionine (Met; M); Phenylalanine (Phe; F); Proline (Pro; P); Serine (Ser; S); Threonine (Thr; T); Tryptophan (Trp; W); Tyrosine (Tyr; Y); and Valine (Val; V).

[0241] An “amino acid substitution” refers to a polypeptide or protein comprising one or more substitutions of a wild-type or naturally occurring amino acid with a different amino acid relative to the wild-type or naturally occurring amino acid at that amino acid residue. The substituted amino acid of the invention may be a synthetic or naturally occurring amino acid. In certain embodiments, the substituted amino acid is a naturally occurring amino acid selected from the group consisting of: A, R, N, D, C, Q, E, G, H, I, L, K, M, F, P, S, T, W, Y, and V. Substitution mutants may be described using an abbreviated system. For example, a substitution mutation in which the fifth (5.sup.th) amino acid residue is substituted may be abbreviated as “X5Y,” wherein “X” is the wild-type or naturally occurring amino acid to be replaced, “5” is the amino acid residue within the protein or polypeptide, and “Y” is the substituted, or non-wild-type or non-naturally occurring, amino acid.

[0242] The term “recombinant” when used in reference to a nucleic acid molecule, peptide, polypeptide, or protein means of, or resulting from, a new combination of genetic material that is not known to exist in nature. A recombinant molecule can be produced by any of the well-known techniques available in the field of recombinant technology, including, but not limited to, polymerase chain reaction (PCR), gene splicing (e.g., using restriction endonucleases), and solid state synthesis of nucleic acid molecules, peptides, or proteins.

[0243] An “isolated” polypeptide, protein, peptide, or nucleic acid is a molecule that has been removed from its natural environment. It is also to be understood that “isolated” polypeptides, proteins, peptides, or nucleic acids may be formulated with excipients such as diluents or adjuvants and still be considered isolated.

[0244] As used herein, the terms “regulatory sequences,” “regulatory elements,” and “control elements” are interchangeable and refer to polynucleotide sequences that are upstream (5′ non-coding sequences), within, or downstream (3′ non-translated sequences) of a polynucleotide target to be expressed. Regulatory sequences influence, for example, the timing of transcription, amount or level of transcription, RNA processing or stability, and/or translation of the related structural nucleotide sequence. Regulatory sequences may include activator binding sequences, enhancers, introns, polyadenylation recognition sequences, promoters, repressor binding sequences, stem-loop structures, translational initiation sequences, translation leader sequences, transcription termination sequences, translation termination sequences, primer binding sites, and the like.

[0245] As used herein, “promoter,” “promoter sequence,” or “promoter region” refers to a DNA regulatory region/sequence capable of binding RNA polymerase and involved in initiating transcription of a downstream coding or non-coding sequence. In some examples, the promoter sequence includes the transcription initiation site and extends upstream to include the minimum number of bases or elements necessary to initiate transcription at levels detectable above background. In some embodiments, the promoter sequence includes a transcription initiation site, as well as protein binding domains responsible for the binding of RNA polymerase. Eukaryotic promoters will often, but not always, contain “TATA” boxes and “CAT” boxes.

[0246] “Constitutive promoters” are typically active, i.e., promote transcription, under most conditions. “Inducible promoters” are typically active only under certain conditions, such as in the presence of a given molecule factor (e.g., IPTG) or a given environmental condition (e.g., particular CO2 concentration, nutrient levels, light, heat). In the absence of that condition, inducible promoters typically do not allow significant or measurable levels of transcriptional activity. For example, inducible promoters may be induced according to temperature, pH, a hormone, a metabolite (e.g., lactose, mannitol, an amino acid), light (e.g., wavelength specific), osmotic potential (e.g., salt-induced), heavy metal, or an antibiotic. Numerous standard inducible promoters will be known to one of skill in the art.

[0247] As used herein the term “operably linked” refers to polynucleotide sequences or amino acid sequences placed into a functional relationship with one another. For instance, a promoter or enhancer is operably linked to a coding sequence if it regulates, or contributes to the modulation of, the transcription of the coding sequence. Operably linked DNA sequences encoding regulatory sequences are typically contiguous to the coding sequence. However, enhancers can function when separated from a promoter by up to several kilobases or more. Accordingly, some polynucleotide elements may be operably linked but not contiguous. Coding sequences can be operably-linked to regulatory sequences in sense or antisense orientation.

[0248] The terms “vector” and “plasmid” are used interchangeably and as used herein refer to a polynucleotide vehicle to introduce genetic material into a cell. Vectors can be linear or circular. Vectors can integrate into a target genome of a host cell or replicate independently in a host cell. Vectors can comprise, for example, an origin of replication, a multicloning site, and/or a selectable marker. An expression vector typically comprises an expression cassette. Vectors and plasmids include, but are not limited to, integrating vectors, prokaryotic plasmids, eukaryotic plasmids, plant synthetic chromosomes, episomes, viral vectors, cosmids, and artificial chromosomes. The term “vector” also includes both viral and nonviral means for introducing a nucleic acid molecule into a cell in vitro, in vivo, or ex vivo. Vectors may be introduced into the desired host cells by well-known methods, including, but not limited to, transfection, transduction, cell fusion, and lipofection. Vectors can comprise various regulatory elements including promoters.

[0249] The term “expression cassette” refers to a polynucleotide construct, generated recombinantly or synthetically, comprising regulatory sequences operably linked to a selected polynucleotide to facilitate expression of the selected polynucleotide in a host cell. For example, the regulatory sequences can facilitate transcription of the selected polynucleotide in a host cell, or transcription and translation of the selected polynucleotide in a host cell. An expression cassette can, for example, be integrated in the genome of a host cell or be present in an expression vector.

[0250] As used herein, the term “expression” refers to transcription of a polynucleotide from a DNA template, resulting in, for example, an mRNA or other RNA transcript (e.g., non-coding, such as structural or scaffolding RNAs). The term further refers to the process through which transcribed mRNA is translated into peptides, polypeptides, or proteins. Transcripts and encoded polypeptides may be referred to collectively as “gene product.” Expression may include splicing the mRNA in a eukaryotic cell, if the polynucleotide is derived from genomic DNA.

[0251] “Transfection” as used herein means the introduction of an exogenous nucleic acid molecule, including a vector, into a cell. A “transfected” cell comprises an exogenous nucleic acid molecule inside the cell and a “transformed” cell is one in which the exogenous nucleic acid molecule within the cell induces a phenotypic change in the cell. The transfected nucleic acid molecule can be integrated into the host cell's genomic DNA and/or can be maintained by the cell, temporarily or for a prolonged period of time, extra-chromosomally. Host cells or organisms that express exogenous nucleic acid molecules or fragments are referred to as “recombinant,” “transformed,” or “transgenic” organisms. In some embodiments, the invention is directed to a host cell comprising any of the expression vectors described herein, e.g., an expression vector comprising a polynucleotide encoding a Cas protein or variant thereof. In some embodiments, the invention is directed to a host cell comprising an expression vector comprising a polynucleotide encoding a Cas3, Cas9 or Cas10 protein or variant thereof.

[0252] In some embodiments, the alteration results in reduced expression of the target polynucleotide sequence. The terms “decrease,” “reduced,” “reduction,” and “decrease” are all used herein generally to mean a decrease by a statistically significant amount. However, for avoidance of doubt, decrease,” “reduced,” “reduction,” “decrease” means a decrease by at least 10% as compared to a reference level, for example a decrease by at least about 20%, or at least about 30%, or at least about 40%, or at least about 50%, or at least about 60%, or at least about 70%, or at least about 80%, or at least about 90% or up to and including a 100% decrease (i.e. absent level as compared to a reference sample), or any decrease between 10-100% as compared to a reference level.

[0253] The terms “increased”, “increase” or “enhance” or “activate” are all used herein to generally mean an increase by a statically significant amount; for the avoidance of any doubt, the terms “increased”, “increase” or “enhance” or “activate” means an increase of at least 10% as compared to a reference level, for example an increase of at least about 10%, or at least about 20%, or at least about 30%, or at least about 40%, or at least about 50%, or at least about 60%, or at least about 70%, or at least about 80%, or at least about 90% or up to and including a 100% increase or any increase between 10-100% as compared to a reference level, or at least about a 2-fold, or at least about a 3-fold, or at least about a 4-fold, or at least about a 5-fold or at least about a 10-fold increase, or any increase between 2-fold and 10-fold or greater as compared to a reference level.

[0254] The terms “inactivate” or “inactivation” are used herein to generally mean that the expression of a gene of interest is reduced as compared to a reference level or not expressed in a functional or active protein form. The terms “partially inactivate” or “partial inactivation” refer to an expression of the gene of interest that is reduced but not eliminated as compared to a reference level, or that a percentage of the proteins expressed by the gene still retain their activity and function. The terms “fully inactivate” or “full inactivation” as used herein mean that the gene of interest does not express any protein or all of the expressed proteins encoded by the gene of interest are inactive and nonfunctional.

[0255] As used herein, the term “exogenous” in intended to mean that the referenced molecule or the referenced polypeptide is introduced into the cell of interest. The polypeptide can be introduced, for example, by introduction of an encoding nucleic acid into the genetic material of the cells such as by integration into a chromosome or as non-chromosomal genetic material such as a plasmid or expression vector. Therefore, the term as it is used in reference to expression of an encoding nucleic acid refers to introduction of the encoding nucleic acid in an expressible form into the cell.

[0256] The term “endogenous” refers to a referenced molecule or polypeptide that is present in the cell. Similarly, the term when used in reference to expression of an encoding nucleic acid refers to expression of an encoding nucleic acid contained within the cell and not exogenously introduced.

[0257] As used herein the term “modification” refers to an alteration that physically differentiates the modified molecule from the parent molecule. In one embodiment, a variant polypeptide includes one or more modifications that differentiates the function of the variant polypeptide from the unmodified polypeptide. For example, an amino acid change in a variant polypeptide affects its receptor binding profile. In other embodiments, a variant polypeptide comprises substitution, deletion, or insertion modifications, or combinations thereof. In another embodiment, a variant polypeptide includes one or more modifications that increases its affinity for a receptor compared to the affinity of the unmodified polypeptide. In one embodiment, a variant polypeptide includes one or more substitutions, insertions, or deletions relative to a corresponding native or parent sequence. In certain embodiments, a variant polypeptide includes 1, 2, 3, 4, 5, 6, 7, 8, 9, 10, 11, 12, 13, 14, 15, 16, 17, 18, 19, 20, 21, 22, 23, 24, 25, 26, 27, 28, 29, 30, 31 to 40, 41 to 50, or 51 or more modifications.

[0258] The terms “inhibitors,” “activators,” and “modulators” as used herein refer to agents that affect a function or expression of a biologically-relevant molecule. The term “modulator” includes both inhibitors and activators. They may be identified using in vitro and in vivo assays for expression or activity of a target molecule. In some cases, “inhibitors” are agents that, e.g., inhibit expression or bind to target molecules or proteins. They may partially or totally block stimulation or have protease inhibitor activity. They may reduce, decrease, prevent, or delay activation, including inactivation, desensitization, or down regulation of the activity of the described target protein. Modulators may be antagonists or agonists of the target molecule or protein. In some cases, “activators” are agents that, e.g., induce or activate the function or expression of a target molecule or protein. They may bind to, stimulate, increase, open, activate, or facilitate the target molecule activity. Activators may be agonists of the target molecule or protein. The terms “subject” and “individual” are used interchangeably herein, and refer to an animal, for example, a human from whom cells can be obtained and/or to whom treatment, including prophylactic treatment, with the cells as described herein, is provided. For treatment of those infections, conditions or disease states which are specific for a specific animal such as a human subject, the term subject refers to that specific animal. The “non-human animals” and “non-human mammals” as used interchangeably herein, includes mammals such as rats, mice, rabbits, sheep, cats, dogs, cows, pigs, and non-human primates. The term “subject” also encompasses any vertebrate including but not limited to mammals, reptiles, amphibians and fish. However, advantageously, the subject is a mammal such as a human, or other mammals such as a domesticated mammal, e.g. dog, cat, horse, and the like, or production mammal, e.g. cow, sheep, pig, and the like.

[0259] The terms “homologs” and “homologous sequences” refer to bioactive molecules that are similar to a reference molecule at the nucleotide sequence, peptide sequence, functional, or structural level. Homologs may include sequence derivatives that share a certain percent identity with the reference sequence. Thus, in one embodiment, homologous or derivative sequences share at least a 70 percent sequence identity. In a specific embodiment, homologous or derivative sequences share at least an 80 or 85 percent sequence identity. In a specific embodiment, homologous or derivative sequences share at least a 90 percent sequence identity. In a specific embodiment, homologous or derivative sequences share at least a 95 percent sequence identity. In a more specific embodiment, homologous or derivative sequences share at least an 50, 55, 60, 65, 70, 75, 85, 86, 87, 88, 89, 90, 91, 92, 93, 94, 95, 96, 97, 98, or 99 percent sequence identity. In one embodiment, homologous or derivative sequences share 100% sequence identity to the reference sequence. Homologous or derivative nucleic acid sequences may also be defined by their ability to remain bound to a reference nucleic acid sequence under high stringency hybridization conditions. Homologs having a structural or functional similarity to a reference molecule may be chemical derivatives of the reference molecule. Methods of detecting, generating, and screening for structural and functional homologs as well as derivatives are known in the art.

[0260] It is intended that every maximum numerical limitation given throughout this specification includes every lower numerical limitation, as if such lower numerical limitations were expressly written herein. Every minimum numerical limitation given throughout this specification will include every higher numerical limitation, as if such higher numerical limitations were expressly written herein. Every numerical range given throughout this specification will include every narrower numerical range that falls within such broader numerical range, as if such narrower numerical ranges were all expressly written herein.

[0261] The term “sequence identity” or “% identity” in the context of two or more nucleic acid or polypeptide sequences, refers to two or more sequences or subsequences that have a specified percentage of nucleotides or amino acid residues that are the same, when compared and aligned for maximum correspondence, as measured using one of the sequence comparison algorithms described below (e.g., BLASTP and BLASTN or other algorithms available to persons of skill) or by visual inspection. Depending on the application, the percent “identity” can exist over a region of the sequence being compared, e.g., over a functional domain, or, alternatively, exist over the full length of the two sequences to be compared. For sequence comparison, typically one sequence acts as a reference sequence to which test sequences are compared. When using a sequence comparison algorithm, test and reference sequences are input into a computer, subsequence coordinates are designated, if necessary, and sequence algorithm program parameters are designated. The sequence comparison algorithm then calculates the percent sequence identity for the test sequence(s) relative to the reference sequence, based on the designated program parameters.

[0262] Optimal alignment of sequences for comparison can be conducted, e.g., by the local homology algorithm of Smith & Waterman, Adv. Appl. Math. 2:482 (1981), by the homology alignment algorithm of Needleman & Wunsch, J. Mol. Biol. 48:443 (1970), by the search for similarity method of Pearson & Lipman, Proc. Nat'l. Acad. Sci. USA 85:2444 (1988), by computerized implementations of these algorithms (GAP, BESTFIT, FASTA, and TFASTA in the Wisconsin Genetics Software Package, Genetics Computer Group, 575 Science Dr., Madison, Wis.), or by visual inspection (see generally Ausubel et al, infra).

[0263] One example of an algorithm that is suitable for determining percent sequence identity and sequence similarity is the BLAST algorithm, which is described in Altschul et al, J. Mol. Biol. 215:403-410 (1990). Software for performing BLAST analyses is publicly available through the National Center for Biotechnology Information.

[0264] The practice of the particular embodiments will employ, unless indicated specifically to the contrary, conventional methods of chemistry, biochemistry, organic chemistry, molecular biology, microbiology, recombinant DNA techniques, genetics, immunology, and cell biology that are within the skill of the art, many of which are described below for the purpose of illustration. Such techniques are explained fully in the literature. See, e.g., Sambrook, et al., Molecular Cloning: A Laboratory Manual (3rd Edition, 2001); Sambrook, et al., Molecular Cloning: A Laboratory Manual (2nd Edition, 1989); Maniatis et al., Molecular Cloning: A Laboratory Manual (1982); Ausubel et al., Current Protocols in Molecular Biology (John Wiley and Sons, updated July 2008); Short Protocols in Molecular Biology: A Compendium of Methods from Current Protocols in Molecular Biology, Greene Pub. Associates and Wiley-Interscience; Glover, DNA Cloning: A Practical Approach, vol. I & II (IRL Press, Oxford, 1985); Anand, Techniques for the Analysis of Complex Genomes, (Academic Press, New York, 1992); Transcription and Translation (B. Hames & S. Higgins, Eds., 1984); Perbal, A Practical Guide to Molecular Cloning (1984); Harlow and Lane, Antibodies, (Cold Spring Harbor Laboratory Press, Cold Spring Harbor, N.Y., 1998) Current Protocols in Immunology Q. E. Coligan, A. M. Kruisbeek, D. H. Margulies, E. M. Shevach and W. Strober, eds., 1991); Annual Review of Immunology; as well as monographs in journals such as Advances in Immunology.

[0265] It is noted that the claims may be drafted to exclude any optional element. As such, this statement is intended to serve as antecedent basis for use of such exclusive terminology as “solely,” “only,” and the like in connection with the recitation of claim elements, or use of a “negative” limitation. As will be apparent to those of skill in the art upon reading this disclosure, each of the individual embodiments described and illustrated herein has discrete components and features readily separated from or combined with the features of any of the other several embodiments without departing from the scope or spirit of the invention. Any recited method may be carried out in the order of events recited or in any other order that is logically possible. Although any methods and materials similar or equivalent to those described herein may also be used in the practice or testing of the invention, representative illustrative methods and materials are now described.

[0266] As described in the present invention, the following terms will be employed, and are defined as indicated below.

[0267] Before the invention is further described, it is to be understood that this invention is not limited to particular embodiments described, as such may, of course, vary. It is also to be understood that the terminology used herein is for the purpose of describing particular embodiments only, and is not intended to be limiting, since the scope of the present invention will be limited only by the appended claims.

[0268] Unless defined otherwise, all technical and scientific terms used herein have the same meaning as commonly understood by one of ordinary skill in the art to which this invention belongs. Where a range of values is provided, it is understood that each intervening value, to the tenth of the unit of the lower limit unless the context clearly dictates otherwise, between the upper and lower limit of that range and any other stated or intervening value in that stated range, is encompassed within the invention. The upper and lower limits of these smaller ranges may independently be included in the smaller ranges and are also encompassed within the invention, subject to any specifically excluded limit in the stated range. Where the stated range includes one or both of the limits, ranges excluding either or both of those included limits are also included in the invention. Certain ranges are presented herein with numerical values being preceded by the term “about.” The term “about” is used herein to provide literal support for the exact number that it precedes, as well as a number that is near to or approximately the number that the term precedes. In determining whether a number is near to or approximately a specifically recited number, the near or approximating unrecited number may be a number, which, in the context presented, provides the substantial equivalent of the specifically recited number.

[0269] All publications, patents, and patent applications cited in this specification are incorporated herein by reference to the same extent as if each individual publication, patent, or patent application were specifically and individually indicated to be incorporated by reference. Furthermore, each cited publication, patent, or patent application is incorporated herein by reference to disclose and describe the subject matter in connection with which the publications are cited. The citation of any publication is for its disclosure prior to the filing date and should not be construed as an admission that the invention described herein is not entitled to antedate such publication by virtue of prior invention. Further, the dates of publication provided might be different from the actual publication dates, which may need to be independently confirmed.

### III. DETAILED DESCRIPTION OF THE EMBODIMENTS

[0270] A. Engineered Histocompatible Cells

[0271] As will be appreciated, the methods provided herein can be conducted on any type of nucleated cell. In some embodiments, the cell (e.g., unmodified cell) is a type A cell. In some embodiments, the cell is a type B cell. In some embodiments, the cell is a type AB cell. In some embodiments, the cell is a type O cell. In some embodiments, the cell is a type O cell. In some embodiments, the cell is a type A Rh+ (e.g., A+) cell. In some embodiments, the cell is a type A RH− (e.g., A−) cell. In some embodiments, the cell is a type B Rh+(e.g., B+) cell. In some embodiments, the cell is a type B Rh− (e.g., B−) cell. In some embodiments, the cell is a type AB Rh+(e.g., AB+) cell. In some embodiments, the cell is a type AB Rh− (e.g., AB−) cell. In some embodiments, the cell is a type O Rh+(e.g., O+) cell. In some embodiments, the cell (e.g., unmodified cell) is a type hh cell and has a Bombay phenotype.

[0272] In some embodiments, engineered histocompatible cells outlined herein are produced using gene editing to modify one or more of the cells' histo-blood antigens including A, B, H, and Rh antigens. In some embodiments, an engineered histocompatible cell is generated using gene editing to modify, for instance, a type A cell to a type O cell, a type B cell to a type O cell, a type AB cell to a type O cell, a type A+ cell to a type O− cell, a type A− cell to a type O− cell, a type AB+ cell to a type O− cell, a type AB− cell to a type O− cell, a type B+ cell to a type O− cell, and a type B− cell to a type O− cell.

[0273] In some embodiments, a cell from a blood group A individual or a group A cell is genetically modified at the ABO gene to no longer produce a functional glycosyltransferase with α(1,3) N-acetylgalactosaminyltransferase activity. In some embodiments, a cell from a blood group B individual or a group B cell is genetically modified at the ABO gene to no longer produce a functional glycosyltransferase with α(1,3)galactosyltransferase activity. In some embodiments, a cell from a blood group A individual, a blood group B individual, or a blood group AB individual is engineered according to the methods described herein to produce a cell lacking ABO activity. In some instances, such a cell without ABO activity expresses or presents an unmodified H antigen.

[0274] In some embodiments, an engineered histocompatible cell comprises a gene modification in the ABO gene. In some embodiments, the gene modification affects one allele of the ABO gene. In some embodiments, the gene modification affects two alleles of the ABO gene. In some embodiments, the gene modification is an insertion, deletion, or disruption of the ABO gene. In some embodiments, the gene modification is a homozygous modification of the ABO gene. In some embodiments, the gene modification is a heterozygous modification of the ABO gene.

[0275] In some embodiments, an engineered histocompatible cell comprises a gene modification in the FUT1 gene. In some embodiments, the gene modification affects one allele of the FUT1 gene. In some embodiments, the gene modification affects two alleles of the FUT1 gene. In some embodiments, the gene modification is an insertion, deletion, or disruption of the FUT1 gene. In some embodiments, the gene modification is a homozygous modification of the FUT1 gene. In some embodiments, the gene modification is a heterozygous modification of the FUT1 gene.

[0276] In some embodiments, an engineered histocompatible cell comprises a gene modification in the RHD gene. In some embodiments, the gene modification affects one allele of the RHD gene. In some embodiments, the gene modification affects two alleles of the RHD gene. In some embodiments, the gene modification is an insertion, deletion, or disruption of the RHD gene. In some embodiments, the gene modification is a homozygous modification of the RHD gene. In some embodiments, the gene modification is a heterozygous modification of the RHD gene.

[0277] In some embodiments, an engineered histocompatible cell comprises a gene modification of the ABO gene such that a functional ABO gene product is not generated by the cell. In some embodiments, an engineered histocompatible cell comprises a gene modification of the FUT1 gene such that a functional FUT1 gene product is not generated by the cell. In some embodiments, an engineered histocompatible cell comprises a gene modification of the RHD gene such that a functional RHD gene product is not generated by the cell.

[0278] In some embodiments, an engineered histocompatible cell comprises a gene modification in one or more genes encoding histocompatibility determinants. In some embodiments, the cell comprises a gene modification of the ABO gene and a gene modification of the RHD gene. In some instances, the engineered cell is a type O negative cell.

[0279] In some embodiments, the engineered cell comprises a gene modification of the FUT1 gene and a gene modification of the RHD gene. As such, the engineered cell can be a type O negative cell.

[0280] Gene editing using a rare-cutting endonuclease such as, but not limited to Cas9 is utilized to a targeted disruption of one or more genes encoding a histocompatibility determinant, such as but not limited to, an ABO gene, a FUT1 gene, and an RHD gene.

[0281] In some instances, the targeted disruption of the ABO gene targets any one of its coding exons. In other instances, the targeted disruption of the FUT1 gene targets any one of its coding exons. In certain instances, the targeted disruption of the RHD gene targets any one of its coding exons. In some embodiments, the entire coding sequence or a large portion thereof of the gene is disrupted or excised. In some embodiments, insertion-deletions by way of CRISPR/Cas9 editing are introduced into the cell to disruption of the ABO gene, the RHD gene, and/or the FUT1 gene.

[0282] In some embodiments, a RNA guided-DNA nuclease is used to target the coding sequence of the ABO gene to introduce deleterious variations of the ABO gene and disruption ABO function. In other embodiments, the untranslated region, intron sequence and/or exon sequences of the ABO are targeted.

[0283] In some embodiments, the deleterious variation of the ABO gene comprises an indel. In some embodiments, the deleterious variation of the ABO gene comprises a deletion. In some embodiments, the deleterious variation of the ABO gene comprises an insertion. In some embodiments, the deleterious variation of the ABO gene comprises a frameshift mutation. In some embodiments, the deleterious variation of the ABO gene comprises a substitution. In some embodiments, the deleterious variation of the ABO gene comprises a point mutation. In some embodiments, the deleterious variation of the ABO gene reduced the expression of the gene. In some embodiments, the deleterious variation of the ABO gene comprises a loss-of-function mutation.

[0284] In some embodiments, a RNA guided-DNA nuclease is used to target the coding sequence of the FUT1 gene to introduce deleterious variations of the FUT1 gene and disruption FUT1 function. In other embodiments, the untranslated region, intron sequence and/or exon sequences of the FUT1 are targeted.

[0285] In some embodiments, the deleterious variation of the FUT1 gene comprises an indel. In some embodiments, the deleterious variation of the FUT1 gene comprises a deletion. In some embodiments, the deleterious variation of the FUT1 gene comprises an insertion. In some embodiments, the deleterious variation of the FUT1 gene comprises a frameshift mutation. In some embodiments, the deleterious variation of the FUT1 gene comprises a substitution. In some embodiments, the deleterious variation of the FUT1 gene comprises a point mutation. In some embodiments, the deleterious variation of the FUT1 gene reduced the expression of the gene. In some embodiments, the deleterious variation of the FUT1 gene comprises a loss-of-function mutation.

[0286] In some embodiments, a RNA guided-DNA nuclease is used to target the coding sequence of the RHD gene to introduce deleterious variations of the RHD gene and disruption RHD function. In other embodiments, the untranslated region, intron sequence and/or exon sequences of the RHD are targeted.

[0287] In some embodiments, the deleterious variation of the RHD gene comprises an indel. In some embodiments, the deleterious variation of the RHD gene comprises a deletion. In some embodiments, the deleterious variation of the RHD gene comprises an insertion. In some embodiments, the deleterious variation of the RHD gene comprises a frameshift mutation. In some embodiments, the deleterious variation of the RHD gene comprises a substitution. In some embodiments, the deleterious variation of the RHD gene comprises a point mutation. In some embodiments, the deleterious variation of the RHD gene reduced the expression of the gene. In some embodiments, the deleterious variation of the RHD gene comprises a loss-of-function mutation.

[0288] In some embodiments, the histocompatibility of the cells is determined using a complement mediated cell killing assay. A non-limiting example of such as assay is an XCelligence SP platform (ACEA BioSciences).

[0289] The histocompatible cells of the present invention can be produced from cells including cells in culture, for example cultured mammalian cells, e.g., cultured human cells. In some embodiments, the cells are stem cells. In some embodiments, the stem cells retain pluripotency. In some embodiments, the stem cells retain differentiation potential. In some embodiments, the cells are pluripotent stem cells or non-pluripotent stem cells, multipotent stem cells or non-multipotent stem cells, progenitor cells or non-progenitor cells, differentiated cells or non-differentiated cell, and the like. In some embodiments, the cells are primary cells or cell lines (e.g., a mammalian cell lines including human cell lines).

[0290] In some embodiments, the histocompatible cells of the present invention are produced from cells that are pluripotent stem cells, induced pluripotent stem cells, embryonic stem cells (such as RUES2 or H9 cells), adult stem cells, and multipotent stem cells. In certain embodiments, the cells are differentiated cells derived or generated from pluripotent stem cells, induced pluripotent stem cells, embryonic stem cells (such as RUES2 or H9 cells), adult stem cells, and multipotent stem cells. Such differentiated cells can be a cell type of any tissue or organ of the body. In some embodiments, the cells are any type that is useful for cell-based therapies.

[0291] In some embodiments, the histocompatible cells of the present invention are produced from cells are from any organ or tissue of the body, including but not limited to, epithelial, connective, muscular, or nervous tissue or cells, and combinations thereof. In some instances, the cells from any eukaryotic (e.g., mammalian) organ system, for example, from the cardiovascular system (heart, vasculature); digestive system (esophagus, stomach, liver, gallbladder, pancreas, intestines, colon, rectum and anus); endocrine system (hypothalamus, pituitary gland, pineal body or pineal gland, thyroid, parathyroids, adrenal glands); excretory system (kidneys, ureters, bladder); lymphatic system (lymph, lymph nodes, lymph vessels, tonsils, adenoids, thymus, spleen); integumentary system (skin, hair, nails); muscular system (e.g., skeletal muscle); nervous system (brain, spinal cord, nerves); reproductive system (ovaries, uterus, mammary glands, testes, vas deferens, seminal vesicles, prostate); respiratory system (pharynx, larynx, trachea, bronchi, lungs, diaphragm); skeletal system (bone, cartilage), and combinations thereof.

[0292] In some embodiments, the histocompatible cells of the present invention are produced from cells are from a highly mitotic tissue (e.g., a highly mitotic healthy tissue, such as epithelium, embryonic tissue, bone marrow, intestinal crypts).

[0293] In some embodiments, the histocompatible cells of the present invention are produced from adult stem cells, which are stem cells from any organ or tissue of the body, including but not limited to, epithelial, connective, muscular, or nervous tissue or cells, and combinations thereof. In some instances, the histocompatible cells of the present invention are produced from cells from any eukaryotic (e.g., mammalian) organ system, for example, from the cardiovascular system (heart, vasculature); digestive system (esophagus, stomach, liver, gallbladder, pancreas, intestines, colon, rectum and anus); endocrine system (hypothalamus, pituitary gland, pineal body or pineal gland, thyroid, parathyroids, adrenal glands); excretory system (kidneys, ureters, bladder); lymphatic system (lymph, lymph nodes, lymph vessels, tonsils, adenoids, thymus, spleen); integumentary system (skin, hair, nails); muscular system (e.g., skeletal muscle); nervous system (brain, spinal cord, nerves); reproductive system (ovaries, uterus, mammary glands, testes, vas deferens, seminal vesicles, prostate); respiratory system (pharynx, larynx, trachea, bronchi, lungs, diaphragm); skeletal system (bone, cartilage), and combinations thereof. In many embodiments, the multipotent stem cells are cells that have the capacity to self-renew and develop (differentiated) into two or more specialized cell types present in a specific organ or tissue of the body, as described herein.

[0294] In some embodiments, the histocompatible cells of the present invention are produced from cells that are progenitor cells, e.g., bone marrow stromal cells, marrow derived adult progenitor cells (MAPCs), endothelial progenitor cells (EPC), blast cells, intermediate progenitor cells formed in the subventricular zone, neural stem cells, muscle stem cells, satellite cells, liver stem cells, hematopoietic stem cells, bone marrow stromal cells, epidermal stem cells, embryonic stem cells (such as RUES2 or H9 cells), mesenchymal stem cells, umbilical cord stem cells, precursor cells, muscle precursor cells, myoblast, cardiomyoblast, neural precursor cells, glial precursor cells, neuronal precursor cells, and hepatoblasts.

[0295] B. Methods of Modifying Expression of Histocompatible-Blood Determinants

[0296] Provided herein are methods of modifying nucleic acid sequences within cells to generate genetically modified cells. Exemplary technologies for such modification include homologous recombination, knock-in technology, zinc finger nucleases (ZFNs), transcription activator-like effector nucleases (TALENs), CRISPR/Cas9, and other site-specific nuclease technologies. These techniques enable double-strand DNA breaks at desired locus sites. These controlled double-strand breaks promote homologous recombination at the specific locus sites. This process focuses on targeting specific sequences of nucleic acid molecules, such as chromosomes, with endonucleases that recognize and bind to the sequences and induce a double-stranded break in the nucleic acid molecule. The double-strand break is repaired either by an error-prone non-homologous end-joining (NHEJ) or by homologous recombination (HR).

[0297] In one embodiment, the cells are manipulated using CRISPR/Cas technologies as is known in the art. There are a large number of techniques based on CRISPR, see, e.g., Doudna and Charpentier, Science, doi:10.1126/science.1258096. CRISPR techniques and kits are sold commercially.

[0298] In some embodiments, the cells of the invention are made using Transcription Activator-Like Effector Nucleases (TALEN) methodologies. TALEN are restriction enzymes combined with a nuclease that can be engineered to bind to and cut practically any desired DNA sequence. TALEN kits are sold commercially.

[0299] In some embodiments, the cells are manipulated using zinc finger nuclease technologies. Zinc finger nucleases are artificial restriction enzymes generated by fusing a zinc finger DNA-binding domain to a DNA-cleavage domain. Zinc finger domains can be engineered to target specific desired DNA sequences and this enables zinc-finger nucleases to target unique sequences within complex genomes. By taking advantage of endogenous DNA repair machinery, these reagents can be used to precisely alter the genomes of higher organisms, similar to CRISPR and TALENs.

[0300] As will be appreciated by those in the art, a number of different techniques can be used to engineer cells to be blood histocompatible cells, and in some embodiments, also hypo-immunogenic as outlined herein.

[0301] 1. Genetic Modifications of ABO Gene

[0302] Provided herein are methods for producing a histo-blood type O cell from any other histo-blood type cell using gene editing tools such as but not limited to CRISPR/Cas, TALE-nucleases, zinc finger nucleases, other viral based gene editing system, or RNA interference, such as CRISPR/Cas9 gene editing.

[0303] In some embodiments, a Cas9 editing system is used to target a sequence of the ABO gene to introduce an insertion or deletion into the gene to disrupt its function, and in some instances, to render it inactive. In some embodiments, a single guide RNA is used. In some embodiments, dual guide RNAs are used. In some embodiments, any one of the gRNA target sequences of Tables 1, A, B, and C, are used. In some instances, more than one gRNA target sequence of Tables 1, A, B, and C is used for gene editing.

[0304] In some embodiments, a frame-shift deletion, e.g., a frame-shift single base deletion is introduced into the ABO gene to inactive the gene. In some instances, the deletion is produced using a Cas9 editing system and a guide RNA target sequence of Table 1. In some embodiments, an engineered histocompatible cell comprises a homozygous frame-shift deletion of the ABO gene. In some embodiments, an insertion-deletion (indel) is introduced in a coding exon, such as exon 1. In some embodiments, an insertion-deletion (indel) is introduced in a coding exon, such as exon 2. In some embodiments, an insertion-deletion (indel) is introduced in a coding exon, such as exon 8. In some instances, the indel is produced using a Cas9 editing system and a guide RNA target sequence of Table 1. In some embodiments, an engineered histocompatible cell comprises a homozygous indel of the ABO gene.

TABLE 1
Exemplary ABO gRNA target sequences

| SEQ ID NO: | Guide RNA name | Position | Strand | Sequence | PAM |
|---|---|---|---|---|---|
| SEQ ID NO: 1 | ABO Exon #1 gRNA | 36 | 1 | GGCCAGCGTCCGCAACACCT | CGG |
| SEQ ID NO: 2 | ABO Exon #2 gRNA | 13066 | -1 | GGATCATAGGTCGAAGTGCG | TGG |
| SEQ ID NO: 3 | ABO Exon 6-7 gRNA 1 | 17691 | -1 | GCCAGCCAAGGGGTACCACG | AGG |
| SEQ ID NO: 4 | ABO Exon 6-7 gRNA 2 | 17697 | 1 | GATGTCCTCGTGGTACCCCT | TGG |
| SEQ ID NO: 5 | ABO Exon 6-7 gRNA 3 | 17715 | -1 | AATGTGCCCTCCCAGACAAT | GGG |
| SEQ ID NO: 15 | ABO Exon 6-7 gRNA 4 | 17675 | 1 | TCTCTCCATGTGCAGTAGGA | AGG |
| SEQ ID NO: 16 | ABO Exon 6-7 gRNA 5 | 17687 | | CAGTAGGAAGGATGTCCTCG | TGG |

[0305] In some embodiments, an insertion-deletion is generated to introduce a 258delG mutation in exon 6 of the ABO gene by gene editing, e.g., homology-directed repair (HDR). In some instances, ABO 258delG variant is knocked into the ABO gene. In some embodiments, a gRNA target sequence for a specific ABO Cas9 protospacer adjacent motif (PAM) and a HDR donor template encoding the 258delG variation are used to produce an engineered type O cell. In some embodiments, the ABO exon 6-7 gRNA target sequence (ABO exon 6-7 gRNA 1) and the donor template (ABO 258delG donor template guide 1) of Table 2 are used. The donor template includes the 258delG variant and a silent mutation that destroys the PAM site on the reverse strand. In some embodiments, the donor template includes two homology arms, each containing about 10 nt to 1 Kb (e.g., 20, nt, 30 nt, 40 nt, or 50 nt to 1 Kb) of homologous sequence

[0306] In some embodiments, the ABO exon 6-7 gRNA target sequence (ABO exon 6-7 gRNA 2) and the donor template (ABO 258delG donor template guide 2) of Table 2 are used. The donor template includes the 258delG variant and a silent mutation that introduces 2 mismatches in the gRNA sequence to prevent continual editing of the repaired genomic sequence. In some embodiments, the donor template includes two homology, each containing about 10 nt to 1 Kb (e.g., 20, nt, 30 nt, 40 nt, or 50 nt to 1 Kb) of homologous sequence.

[0307] In some embodiments, the ABO exon 6-7 gRNA target sequence (ABO exon 6-7 gRNA 3) and the donor template (ABO 258delG donor template guide 3) of Table 2 are used. The donor template includes the 258delG variant and a silent mutation that introduces 2 mismatches in the gRNA sequence to prevent continual editing of the repaired genomic sequence. In some embodiments, the donor template includes two homology arms, each containing about 10 nt to 1 Kb (e.g., 20, nt, 30 nt, 40 nt, or 50 nt to 1 Kb) of homologous sequence.

[0308] In some embodiments, the ABO exon 6-7 gRNA target sequence (ABO exon 6-7 gRNA 4) and the donor template (ABO 258delG donor template guide 4) of Table 2 are used. The donor template includes the 258delG variant and a silent mutation that introduces 2 mismatches in the gRNA sequence to prevent continual editing of the repaired genomic sequence. In some embodiments, the donor template includes two homology arms, each containing about 10 nt to 1 Kb (e.g., 20, nt, 30 nt, 40 nt, or 50 nt to 1 Kb) of homologous sequence.

TABLE 2
Exemplary ABO HDR Donor Templates

| SEQ ID | Guide | HDR Template | |
|---|---|---|---|
| NO: | RNA name | name | HDR sequence 5′→3′ |
| SEQ ID | ABO Exon | ABO 258delG | TGGGGGCGGCCGTGTGCCAGAGGCGCATGTGGGTGGCACCC |
| NO: 6 | 6-7 gRNA | donor template | TGCCAGCTCCATGTGACCGCACGCCTCTCTCCATGTGCAGTAG |
| | 1 | guide 1 | GAAGGATGTTCTCGTGTACCCCTTGGCTGGCTCCCATTGTCTG |
| | | | GGAGGGCACATTCAACATCGACATCCTCAACGAGCAGTTCAG |
| | | | GCTCCAGAACACCACCATTGGGTTAACTGTG |
| SEQ ID | ABO Exon | ABO 258delG | TGGGGGCGGCCGTGTGCCAGAGGCGCATGTGGGTGGCACCC |
| NO: 7 | 6-7 gRNA | donor template | TGCCAGCTCCATGTGACCGCACGCCTCTCTCCATGTGCAGTAG |
| | 2 | guide 2 | GAAGGATGTCCTCGTAAACCCCTTGGCTGGCTCCCATTGTCTG |
| | | | GGAGGGCACATTCAACATCGACATCCTCAACGAGCAGTTCAG |
| | | | GCTCCAGAACACCACCATTGGGTTAACTGTG |
| SEQ ID | ABO Exon | ABO 258delG | TGGGGGCGGCCGTGTGCCAGAGGCGCATGTGGGTGGCACCC |
| NO: 8 | 6-7 gRNA | donor template | TGCCAGCTCCATGTGACCGCACGCCTCTCTCCATGTGCAGTAG |
| | 3 | guide 3 | GAAGGATGTCCTCGTGTACCCCTTGGCTGGCTCCCATTGTTTG |
| | | | GGAGGGCACTTTCAACATCGACATCCTCAACGAGCAGTTCAG |
| | | | GCTCCAGAACACCACCATTGGGTTAACTGTG |
| SEQ ID | ABO Exon | ABO 258delG | CTCCATGTGACCGCACGCCTCTCTCCATGTGCAGTAGGA |
| NO: 19 | 6-7 gRNA | donor template | AGGATGTCCTCGTGTACCCCTTGGCTGGCTCCCATTGTCT |
| | 4 | guide 4 | GGGAGGGCACATTCAACATCGAC |

[0309] In some embodiments, an engineered histocompatible cell comprises a homozygous 258delG mutation of the ABO gene.

[0310] 2. Genetic Modifications of RHD Gene

[0311] Provided herein are methods for producing a Rh negative cell by gene editing the RHD gene using gene editing tools such as but not limited to CRISPR/Cas, TALE-nucleases, zinc finger nucleases, other viral based gene editing system, or RNA interference. In some embodiments, the gene editing targets the coding sequence of the RHD gene. In some instances, the cells do not generate a functional RHD gene product. In the absence of the RHD gene product, the cells completely lack an Rh blood group antigen.

[0312] In some embodiments, a Cas9 editing system is used to target a sequence of the RHD gene to introduce an insertion or deletion into the gene to disrupt its function, and in some instances, to render it inactive. In some embodiments, a single guide RNA is used. In some embodiments, dual guide RNAs are used. In some embodiments, any one of the gRNA target sequences of Tables 3, D, E, and F are used. In some instances, more than one gRNA target sequences of Tables 3, D, E, and F are used for gene editing.

[0313] In some embodiments, a frame-shift insertion-deletion is introduced in any coding sequence of the gene. In some embodiments, a modification within the UTRs, introns, or exons of the gene is added to disrupt the function of the RHD gene. In some embodiments, CRISPR/Cas9 editing comprising any one or more of the gRNA target sequences of Tables 3, D, E, and F are utilized.

[0314] In some embodiments, a modification is introduced into the RHD gene to inactivate the gene. In some embodiments, coding exons such as exon 1 or exon 2 of the RHD gene are targeted. In some embodiments, coding exon 4 of the RHD gene are targeted. In some embodiments, coding exon 5 of the RHD gene are targeted. In some embodiments, coding exon 6 of the RHD gene are targeted. In some embodiments, coding exon 7 of the RHD gene are targeted. In some embodiments, coding exon 8 of the RHD gene are targeted. In some instances, a deletion is produced using a Cas9 editing system and a guide RNA target sequence targeting a sequence at the 5′ of the RHD gene and a guide RNA target sequence to an exon such as but not limited to exon 8. In some embodiments, one gRNA target sequence is the RHD 5′ UTR guide 1 of Table 3 and one gRNA target sequence is the RHD exon 8 guide 1 of Table 3. In some embodiments, an engineered histocompatible cell comprises a homozygous modification of the RHD gene, thereby inactivating the gene.

TABLE 3
Exemplary RHD gRNA target sequences

| SEQ ID NO: | Guide RNA name | Position | Strand | Sequence | PAM |
|---|---|---|---|---|---|
| SEQ ID NO: 9 | RHD gRNA 1 | 25290638 | -1 | CACCGACAAAGCACTCATGG | TGG |
| SEQ ID NO: 10 | RHD gRNA 2 | 25284571 | 1 | TGGCCAAGATCTGACCGTGA | TGG |
| SEQ ID NO: 11 | RHD Exon 8 guide 1 | 25307729 | 1 | GGAGGCGCTGCGGTTCCTAC | CGG |
| SEQ ID NO: 12 | RHD 5′ UTR guide 1 | 25272403 | -1 | TGGTTGTGCTGGCCTCTCTA | TGG |

[0315] In some embodiments, the gRNA target sequence is to exon 1 or exon 2 of the RHD gene. In some embodiments, the gRNA target sequence is a gRNA of Table 3 that induces a frameshift mutation to inactivate exon 1 or exon 2.

[0316] 3. Genetic Modifications of FUT1 Gene

[0317] Provided herein are methods for producing a histo-blood type O cell from any other histo-blood type cell by gene editing the FUT1 gene using gene editing tools such as but not limited to CRISPR-Cas9, TALE-nucleases, zinc finger nucleases, other viral based gene editing system, or RNA interference. In some embodiments, the gene editing targets the coding sequence of the FUT1 gene. In some instances, the cells do not generate a functional FUT1 gene product. In the absence of FUT1, the cells completely lack the H antigen and have a Bombay histo-blood type (hh).

[0318] In some embodiments, a Cas9 editing system is used to target a sequence of the FUT1 gene to introduce an insertion or deletion into the gene to disrupt its function, and in some instances, to render it inactive. In some embodiments, a single guide RNA is used. In some embodiments, dual guide RNAs are used. In some embodiments, any one of the gRNA target sequences of Tables 4, G, H, and I are used. In some instances, more than one gRNA target sequence of Table 4, G, H, and I is used for gene editing.

[0319] In some embodiments, a modification is introduced into the FUT1 gene to inactive the gene. In some embodiments, coding exons such as exon 4 of the FUT1 gene are targeted. In some instances, the deletion is produced using a Cas9 editing system and a guide RNA target sequence of Table 4. In some embodiments, an engineered histocompatible cell comprises a homozygous modification of the FUT1 gene, thereby inactivating the gene.

TABLE 4
Exemplary FUT1 gRNA target sequences

| SEQ ID NO | Guide RNA name | Position | Strand | Sequence | PAM |
|---|---|---|---|---|---|
| SEQ ID NO: 13 | FUT1 Exon 4 guide | 4226 | -1 | GGTCTGGACACAGGATCGAC | AGG |
| SEQ ID NO: 14 | FUT1 Exon 4 guide | 4367 | -1 | GATTACCAAACCGGCCATTG | GGG |
| | 2 | | | | |
| SEQ ID NO: 20 | FUT1 Exon 4 guide | 4570 | 1 | CTGGATGTCGGAGGAGTACG | CGG |
| | 3 | | | | |

[0320] In some embodiments, a frame-shift insertion-deletion is introduced in any coding sequence of the gene. In some embodiments, a modification within the UTRs, introns, or exons of the gene is added to disrupt the function of the FUT1 gene. In some embodiments, CRISPR-Cas9 editing comprising any one or more of the gRNA target sequences of Tables 4, G, H, and I are utilized.

[0321] In some embodiments, a first gene modification disrupts the function of the ABO gene and a second gene modification disrupts the function of the RHD gene. In some embodiments, a first gene modification disrupts the function of the FUT1 gene and a second gene modification disrupts the function of the RHD gene.

[0322] In general, these methods can be used individually or in combination. In some embodiments, the cells also include a B2M gene modification, a CIITA gene modification, and a CD47 transgene. In some embodiments, the cells have a B2M homozygous null genotype. In some embodiments, the cells have a CIITA homozygous null genotype. In some embodiments, the cells overexpress CD47. In some embodiments, the modified cells carry gene modifications including, but not limited to, B2M^{-/-}, CIITA^{-/-}, CD47 tg.

[0323] In some embodiments, in the generation of the hypoimmunogenic cells including hypoimmunogenic pluripotent stem cells and hypoimmunogenic induced pluripotent stem cells, CRISPR may be used to reduce the expression of active B2M and/or CIITA protein in the engineered cells, with viral techniques (e.g., lentivirus) to knock in the CD47 functionality. Also, as will be appreciated by those in the art, although one embodiment sequentially utilizes a CRISPR step to knock out B2M, followed by a CRISPR step to knock out CIITA with a final step of a lentivirus to knock in the CD47 functionality, these genes can be manipulated in different orders using different technologies.

[0324] C. Additional Modifications to Generate Hypoimmunogenic Cells

[0325] Provided herein are cells comprising a modification of one or more targeted polynucleotide sequences that regulates the expression of MHC I and/or MHC II. In some embodiments, the expression of both MHC I and MHC II is regulated by one or more targeted polynucleotides sequences such as those described herein.

[0326] In some embodiments, the cell comprises a genomic modification of one or more targeted polynucleotide sequences that regulates the expression of MHC I. In some embodiments, the cell comprises a genomic modification of one or more targeted polynucleotide sequences that regulates the expression of MHC II. In some aspects, a genetic editing system is used to modify one or more targeted polynucleotide sequences. In some embodiments, the targeted polynucleotide sequence is one or more selected from the group consisting of B2M, CIITA, and NLRC5. In certain embodiments, the genome of the cell has been altered to reduce or delete critical components of HLA expression.

[0327] In some aspects, the present disclosure provides a stem cell (e.g., pluripotent stem cell or induced pluripotent stem cell) or population thereof comprising a genome in which a gene has been edited to delete a contiguous stretch of genomic DNA, thereby reducing or eliminating surface expression of MHC class I molecules in the cell or population thereof. In some embodiments, the stem cells retain pluripotency. In some embodiments, the stem cells retain differentiation potential. In certain aspects, the present disclosure provides a stem cell (e.g., pluripotent stem cell or induced pluripotent stem cell) or population thereof comprising a genome in which a gene has been edited to delete a contiguous stretch of genomic DNA, thereby reducing or eliminating surface expression of MHC class II molecules in the cell or population thereof. In particular aspects, the present disclosure provides a stem cell (e.g., pluripotent stem cell or induced pluripotent stem cell) or population thereof comprising a genome in which one or more genes has been edited to delete a contiguous stretch of genomic DNA, thereby reducing or eliminating surface expression of MHC class I and II molecules in the cell or population thereof. The efficient interference with the expression of MHC I and/or MHC II proteins can be accomplished by one or more of the following: (1) targeting the polymorphic HLA alleles (HLA-A, -B, -C) and MHC-II genes directly; (2) removal of B2M, which will prevent surface trafficking of all MHC-I molecules; and/or (3) deletion of components of the MHC enhanceosomes, such as LRC5, RFX-5, RFX-associated ankyrin-containing protein (RFX-ANK), RFX-associated protein (RFX-AP), IRF1, NF-Y, and CIITA that are critical for HLA expression.

[0328] In certain embodiments, the expression of MHC I or MHC II is modulated by targeting and deleting a contiguous stretch of genomic DNA thereby reducing or eliminating expression of a target gene selected from the group consisting of B2M, CIITA, and NLRC5.

[0329] In some embodiments, the expression of MHC I is reduced by targeting and deleting a contiguous stretch of genomic DNA, thereby reducing or eliminating expression of HLA-A, HLA-B, and HLA-C. In some embodiments, the expression of MHC I is reduced or eliminated by way of genomic modification of the B2M gene. In some instances, the genomic modification is conducted using a CRISPR/Cas system.

[0330] In some embodiments, the cells and methods described herein include genomically editing human cells to cleave CIITA gene sequences as well as editing the genome of such cells to alter one or more additional target polynucleotide sequences such as, but not limited to, B2M and NLRC5. In some embodiments, the cells and methods described herein include genomically editing human cells to cleave B2M gene sequences as well as editing the genome of such cells to alter one or more additional target polynucleotide sequences such as, but not limited to, CIITA and NLRC5. In some embodiments, the cells and methods described herein include genomically editing human cells to cleave NLRC5 gene sequences as well as editing the genome of such cells to alter one or more additional target polynucleotide sequences such as, but not limited to, B2M and CIITA.

[0331] In some embodiments, the cell also includes a modification to increase expression of one selected from the group consisting of HLA-C, HLA-E, HLA-G, PD-L1, CTLA-4-Ig, C1-inhibitor, and IL-35. In some embodiments, the cells are generating by modulating expression of one or more genes such as RFX-5, RFX-associated ankyrin-containing protein (RFX-ANK), RFX-associated protein (RFX-AP), IRF1, NFY-A, NFY-B, NFY-C, and CIITA that are critical for HLA expression as described in WO2016/183041, incorporated by reference herein in its entirety, and specifically for the related techniques outlined therein. In additional embodiments, further modifications to the producer cells include modulating expression of one or more genes such as OX40, GITR, 4-1BB, CD28, B7-1, B7-2, ICOS, CD27, HVEM, SLAM, CD226, PD1, CTLA4, LAG3, TIGIT, TIM3, CD160, BTLA, CD244, CD30, TLT, VISTA, B7-H3, PD-L2, LFA-1, CD2, CD58, ICAM-3, TCRA, TCRB, FOXP3, HELIOS, ST2, PCSK9, CCR5, and/or APOC3 as described in WO2016/183041, incorporated by reference herein in its entirety, and specifically for the related techniques outlined therein.

[0332] In some embodiments, the cells are generated by the introduction of one or more transgenes such as PDL-1, HLA-G, CD47, CD200, FASLG, CLC21, MFGE8, and/or SERPIN B9, or a gene encoding a biologic that acts as an agonist of PDL-1, HLA-G, CD47, CD200, FASLG, CLC21, MFGE8, and/or SERPIN 9, as described in WO2018/227286, incorporated by reference herein in its entirety, and specifically for the related techniques outlined therein. In some embodiments, the cells are generated by the introduction of transgenes including PDL-1, HLA-G, and CD47. In some embodiments, the cell are generated by the introduction of transgenes including PDL-1 and HLA-G. In some embodiments, the cell are generated by the introduction of transgenes including PDL-1 and CD47. In some embodiments, the cell is generated by further introduction of one or more transgenes such as TGFβ, CD73, CD39, LAG3, IL1R2, ACKR2, TNFRSF22, TNFRSF23, TNFRS10, DAD1, and/or IFNγR1 d39, or a gene encoding a biologic that acts as an agonist of TGFβ, CD73, CD39, LAG3, IL1R2, ACKR2, TNFRSF22, TNFRSF23, TNFRS10, DAD1, and/or IFNγR1 d39, as described in WO2018/227286, incorporated by reference herein in its entirety, and specifically for the related techniques outlined therein.

[0333] In some embodiments, the cells are generated by further introducing into the cells a suicide gene that is activated by a trigger that causes the cells to die. In one embodiment, the suicide gene is a herpes simplex virus thymidine kinase gene (HSV-tk) and the trigger is ganciclovir. In another embodiment, the suicide gene is an Escherichia coli cytosine deaminase gene (EC-CD) and the trigger is 5-fluorocytosine (5-FC). In yet another embodiment, the suicide gene is an inducible Caspase protein and the trigger is a specific chemical inducer of dimerization (CID).

[0334] In some instances, a gene editing system such as the CRISPR/Cas system is used to facilitate the insertion of hypoimmunity factors, such as the hypoimmunity factors into a safe harbor locus, such as the AAVS, HPRT, CCR5 and ROSA26 locus, to actively inhibit immune rejection. In some embodiment, a hypoimmunity factor is inserted into a single safe harbor locus of the cell. In other embodiments, the hypoimmunity factors are inserted into more than one safe harbor locus. In some instances, the hypoimmunity factors are inserted into a safe harbor locus using an expression vector, e.g., a lentiviral expression vector.

[0335] Assays for to determined hypoimmunogenicity of the cells is generally described herein and in WO 2018/132783, incorporated herein by reference. For example, hypoimmunogenicity may be assayed using a number of techniques. These techniques include administration into allogeneic hosts and monitoring the T cell and/or B cell response of the host animal. T cell function can be assessed by ELISpot, ELISA, FACS, PCR, or mass cytometry (CYTOF). B cell response or antibody response can be assessed using FACS or Luminex.

[0336] In some embodiments, the hypoimmunogenic cell exhibits reduced levels of immunogenicity as compared to a reference cell, e.g., an unmodified cell or an immunogenic cell. In some embodiments, the reduced level is at least 5%, 10%, 20%, 30%, 40%, 50%, 60%, 70%, 80%, 90%, 2-fold, 3-fold, 5-fold, 10-fold, 20-fold, 50-fold, or 100-fold reduced.

[0337] In some embodiments, the hypoimmunogenic cell facilitates a reduction in macrophage phagocytosis, e.g., a reduction of 1%, 5%, 10%, 20%, 30%, 40%, 50%, 60%, 70%, 80%, 90%, or more in macrophage phagocytosis compared to a reference cell, e.g., an unmodified cell or an immunogenic cell, wherein the reduction in macrophage phagocytosis is determined by assaying the phagocytosis index in vitro.

[0338] In some embodiments, the hypoimmunogenic cell renders a reduction in cytotoxicity mediated cell lysis by PBMCs, e.g., a reduction of 1%, 5%, 10%, 20%, 30%, 40%, 50%, 60%, 70%, 80%, 90%, or more in cell lysis compared to a reference cell, e.g., an unmodified cell or an immunogenic cell.

[0339] In some embodiments, the hypoimmunogenic cell renders a reduction in NK-mediated cell lysis, e.g., a reduction of 1%, 5%, 10%, 20%, 30%, 40%, 50%, 60%, 70%, 80%, 90%, or more in NK-mediated cell lysis compared to a reference cell, e.g., an unmodified cell or an immunogenic cell, wherein NK-mediated cell lysis is assayed in vitro, by a chromium release assay or europium release assay.

[0340] In some embodiments, the hypoimmunogenic cell gives rise to a reduction in CD8+ T cell mediated cell lysis, e.g., a reduction of 1%, 5%, 10%, 20%, 30%, 40%, 50%, 60%, 70%, 80%, 90%, or more in CD8 T cell mediated cell lysis compared to a reference cell, e.g., an unmodified cell or an immunogenic cell.

[0341] In some embodiments, the hypoimmunogenic cell induces a reduction in CD4+ T cell proliferation and/or activation, e.g., a reduction of 1%, 5%, 10%, 20%, 30%, 40%, 50%, 60%, 70%, 80%, 90%, or more compared to a reference cell, e.g., an unmodified cell or an immunogenic cell, wherein CD4 T cell proliferation is assayed in vitro (e.g. co-culture assay of modified or unmodified mammalian source cell, and CD4+ T cells with CD3/CD28 Dynabeads).

[0342] In some embodiments, the hypoimmunogenic cell causes a reduction in T cell IFN-gamma secretion, e.g., a reduction of 1%, 5%, 10%, 20%, 30%, 40%, 50%, 60%, 70%, 80%, 90%, or more in T cell IFN-gamma secretion compared to a reference cell, e.g., an unmodified cell or an immunogenic cell, wherein T cell IFN-gamma secretion is assayed in vitro, e.g., by IFN-gamma ELISPOT.

[0343] In some embodiments, the hypoimmunogenic cell causes a reduction in secretion of immunogenic cytokines, e.g., a reduction of 1%, 5%, 10%, 20%, 30%, 40%, 50%, 60%, 70%, 80%, 90%, or more in secretion of immunogenic cytokines compared to a reference cell, e.g., an unmodified cell or an immunogenic cell, wherein secretion of immunogenic cytokines is assayed in vitro using ELISA or ELISpot.

[0344] In some embodiments, the hypoimmunogenic cell induces an increased secretion of an immunosuppressive cytokine, e.g., an increase of 1%, 5%, 10%, 20%, 30%, 40%, 50%, 60%, 70%, 80%, 90%, or more in secretion of an immunosuppressive cytokine compared to a reference cell, e.g., an unmodified cell or an immunogenic cell, wherein secretion of the immunosuppressive cytokine is assayed in vitro using ELISA or ELISPOT.

[0345] The cells described herein can also be assessed for immunogenicity. In some embodiments, a cell is analyzed for the presence of antibodies on the cell surface, e.g., by staining with an anti-IgM antibody. In other embodiments, immunogenicity is assessed by a PBMC cell lysis assay. In some embodiments, a cell is incubated with peripheral blood mononuclear cells (PBMCs) and then assessed for lysis of the cells by the PBMCs. In other embodiments, immunogenicity is assessed by a natural killer (NK) cell lysis assay. In some embodiments, a cell is incubated with NK cells and then assessed for lysis of the cells by the NK cells. In other embodiments, immunogenicity is assessed by a CD8+ T cell lysis assay. In some embodiments, a cell is incubated with CD8+ T cells and then assessed for lysis of the cells by the CD8+ T cells.

[0346] 1. CIITA

[0347] In certain aspects, the inventions disclosed herein modulate (e.g., reduce or eliminate) the expression of MHC II genes by targeting and modulating (e.g., reducing or eliminating) Class II transactivator (CIITA) expression. In some aspects, the modulation occurs using a CRISPR/Cas system. CIITA is a member of the LR or nucleotide binding domain (NBD) leucine-rich repeat (LRR) family of proteins and regulates the transcription of MHC II by associating with the MHC enhanceosome.

[0348] In some embodiments, the target polynucleotide sequence of the present invention is a variant of CIITA. In some embodiments, the target polynucleotide sequence is a homolog of CIITA. In some embodiments, the target polynucleotide sequence is an ortholog of CIITA.

[0349] In some aspects, reduced or eliminated expression of CIITA reduces or eliminates expression of one or more of the following MHC class II are HLA-DP, HLA-DM, HLA-DOA, HLA-DOB, HLA-DQ, and HLA-DR.

[0350] In some embodiments, the hypoimmunogenic cells outlined herein comprise a genetic modification targeting the CIITA gene. In some embodiments, the genetic modification targeting the CIITA gene by the rare-cutting endonuclease comprises a Cas protein or a polynucleotide encoding a Cas protein, and at least one guide ribonucleic acid sequence for specifically targeting the CIITA gene. In some embodiments, the at least one guide ribonucleic acid sequence for specifically targeting the CIITA gene is selected from the group consisting of SEQ ID NOS:5184-36352 of Appendix 1 (Table 12 of WO2016183041) provided herewith. In some embodiments, the cell has a reduced ability to induce an immune response in a recipient subject.

[0351] Assays to test whether the CIITA gene has been inactivated are known and described herein. In one embodiment, the resulting genetic modification of the CIITA gene by PCR and the reduction of HLA-II expression can be assays by FACS analysis. In another embodiment, CIITA protein expression is detected using a Western blot of cells lysates probed with antibodies to the CIITA protein. In another embodiment, reverse transcriptase polymerase chain reactions (RT-PCR) are used to confirm the presence of the inactivating genetic modification.

[0352] 2. B2M

[0353] In certain embodiments, the inventions disclosed herein modulate (e.g., reduce or eliminate) the expression of MHC-I genes by targeting and modulating (e.g., reducing or eliminating) expression of the accessory chain B2M. In some aspects, the modulation occurs using a CRISPR/Cas system. By modulating (e.g., reducing or deleting) expression of B2M, surface trafficking of MHC-I molecules is blocked and the cell rendered hypoimmunogenic. In some embodiments, the cell has a reduced ability to induce an immune response in a recipient subject.

[0354] In some embodiments, the target polynucleotide sequence of the present invention is a variant of B2M. In some embodiments, the target polynucleotide sequence is a homolog of B2M. In some embodiments, the target polynucleotide sequence is an ortholog of B2M.

[0355] In some aspects, decreased or eliminated expression of B2M reduces or eliminates expression of one or more of the following MHC I molecules—HLA-A, HLA-B, and HLA-C.

[0356] In some embodiments, the hypoimmunogenic cells outlined herein comprise a genetic modification targeting the B2M gene. In some embodiments, the genetic modification targeting the B2M gene by the rare-cutting endonuclease comprises a Cas protein or a polynucleotide encoding a Cas protein, and at least one guide ribonucleic acid sequence for specifically targeting the B2M gene. In some embodiments, the at least one guide ribonucleic acid sequence for specifically targeting the B2M gene is selected from the group consisting of SEQ ID NOS:81240-85644 of Appendix 2 (Table 15 of WO2016/183041) provided herewith.

[0357] Assays to test whether the B2M gene has been inactivated are known and described herein. In one embodiment, the resulting genetic modification of the B2M gene by PCR and the reduction of HLA-I expression can be assays by FACS analysis. In another embodiment, B2M protein expression is detected using a Western blot of cells lysates probed with antibodies to the B2M protein. In another embodiment, reverse transcriptase polymerase chain reactions (RT-PCR) are used to confirm the presence of the inactivating genetic modification.

[0358] 3. NLRC5

[0359] In certain aspects, the inventions disclosed herein modulate (e.g., reduce or eliminate) the expression of MHC-I genes by targeting and modulating (e.g., reducing or eliminating) expression of the NLR family, CARD domain containing 5/NOD27/CLR16.1 (NLRC5). In some aspects, the modulation occurs using a CRISPR/Cas system. NLRC5 is a critical regulator of MHC-I-mediated immune responses and, similar to CIITA, NLRC5 is highly inducible by IFN-γ and can translocate into the nucleus. NLRC5 activates the promoters of MHC-I genes and induces the transcription of MHC-I as well as related genes involved in MHC-I antigen presentation.

[0360] In some embodiments, the target polynucleotide sequence of the present invention is a variant of NLRC5. In some embodiments, the target polynucleotide sequence is a homolog of NLRC5. In some embodiments, the target polynucleotide sequence is an ortholog of NLRC5.

[0361] In some aspects, decreased or eliminated expression of NLRC5 reduces or eliminates expression of one or more of the following MHC I molecules—HLA-A, HLA-B, and HLA-C.

[0362] In some embodiments, the hypoimmunogenic cells outlined herein comprise a genetic modification targeting the NLRC5 gene. In some embodiments, the genetic modification targeting the NLRC5 gene by the rare-cutting endonuclease comprises a Cas protein or a polynucleotide encoding a Cas protein, and at least one guide ribonucleic acid sequence for specifically targeting the NLRC5 gene. In some embodiments, the at least one guide ribonucleic acid sequence for specifically targeting the NLRC5 gene is selected from the group consisting of SEQ ID NOS:36353-81239 of Appendix 3 (Table 14 of WO2016183041) provided herewith. In some embodiments, the cell has a reduced ability to induce an immune response in a recipient subject.

[0363] Assays to test whether the NLRC5 gene has been inactivated are known and described herein. In one embodiment, the resulting genetic modification of the NLRC5 gene by PCR and the reduction of HLA-I expression can be assays by FACS analysis. In another embodiment, NLRC5 protein expression is detected using a Western blot of cells lysates probed with antibodies to the NLRC5 protein. In another embodiment, reverse transcriptase polymerase chain reactions (RT-PCR) are used to confirm the presence of the inactivating genetic modification.

[0364] 4. HLA-A/B/C

[0365] In some embodiments, the hypoimmunogenic cells of the present invention do not express or exhibit reduced expression of one or more of HLA-A, HLA-B, and HLA-C. In some embodiments, the hypoimmunogenic cells of the present invention do not express or exhibit reduced expression of HLA-A, HLA-B, and HLA-C.

[0366] In some embodiments, the present disclosure provides a stem cell (e.g., hypoimmunogenic stem cell) or population thereof comprising a genome in which the HLA-A gene has been edited to delete a contiguous stretch of genomic DNA, thereby reducing or eliminating surface expression of MHC class I molecules in the cell or population thereof. The contiguous stretch of genomic DNA can be deleted by contacting the cell or population thereof with a Cas protein or a nucleic acid encoding the Cas protein and at least one ribonucleic acid or at least one pair of ribonucleic acids.

[0367] In certain embodiments, the present disclosure provides a method for altering a target HLA-A sequence in a cell comprising contacting the HLA-A sequence with a clustered regularly interspaced short palindromic repeats-associated (Cas) protein and at least one ribonucleic acid or at least one pair of ribonucleic acids, wherein the ribonucleic acids direct Cas protein to and hybridize to a target motif of the target HLA-A polynucleotide sequence, wherein the target HLA-A polynucleotide sequence is cleaved, and wherein the at least one ribonucleic acid or the at least one pair of ribonucleic acids.

[0368] In some embodiments, the present disclosure provides a stem cell (e.g., hypoimmunogenic stem cell) or population thereof comprising a genome in which the HLA-B gene has been edited to delete a contiguous stretch of genomic DNA, thereby reducing or eliminating surface expression of MHC class I molecules in the cell or population thereof. The contiguous stretch of genomic DNA can be deleted by contacting the cell or population thereof with a Cas protein or a nucleic acid encoding the Cas protein and at least one ribonucleic acid or at least one pair of ribonucleic acids.

[0369] In certain embodiments, the present disclosure provides a method for altering a target HLA-B sequence in a cell comprising contacting the HLA-B sequence with a clustered regularly interspaced short palindromic repeats-associated (Cas) protein and at least one ribonucleic acid or at least one pair of ribonucleic acids, wherein the ribonucleic acids direct Cas protein to and hybridize to a target motif of the target HLA-B polynucleotide sequence, wherein the target HLA-B polynucleotide sequence is cleaved, and wherein the at least one ribonucleic acid or the at least one pair of ribonucleic acids.

[0370] In some embodiments, the present disclosure provides a stem cell (e.g., hypoimmunogenic stem cell) or population thereof comprising a genome in which the HLA-C gene has been edited to delete a contiguous stretch of genomic DNA, thereby reducing or eliminating surface expression of MHC class I molecules in the cell or population thereof. The contiguous stretch of genomic DNA can be deleted by contacting the cell or population thereof with a Cas protein or a nucleic acid encoding the Cas protein and at least one ribonucleic acid or at least one pair of ribonucleic acids.

[0371] In certain embodiments, the present disclosure provides a method for altering a target HLA-C sequence in a cell comprising contacting the HLA-C sequence with a clustered regularly interspaced short palindromic repeats-associated (Cas) protein and at least one ribonucleic acid or at least one pair of ribonucleic acids, wherein the ribonucleic acids direct Cas protein to and hybridize to a target motif of the target HLA-C polynucleotide sequence, wherein the target HLA-C polynucleotide sequence is cleaved, and wherein the at least one ribonucleic acid or the at least one pair of ribonucleic acids.

[0372] 5. CD47

[0373] In some aspects, the inventions disclosed herein modulate (e.g., increase) the expression of CD47. In some embodiments, the present disclosure provides a stem cell (e.g., hypoimmunogenic stem cell) or population thereof comprising a genome in which the stem cell genome has been modified to express CD47. In some embodiments, the present disclosure provides a method for altering a stem cell genome to express CD47. In certain embodiments, at least one ribonucleic acid or at least one pair of ribonucleic acids may be utilized to facilitate the insertion of CD47 into a stem cell line. In certain embodiments, the at least one ribonucleic acid or the at least one pair of ribonucleic acids is selected from the group consisting of SEQ ID NOS:200784-231885 of Appendix 4 (Table 29 of WO2016183041) provided herein.

[0374] D. Methods of Genetic Modifications

[0375] The present invention contemplates altering target polynucleotide sequences in any manner which is available to the skilled artisan. In some embodiments, the method includes utilizing a CRISPR/Cas system of the present invention. For instance, base-editing systems including, but not limited to, disabled Cas9 proteins can be utilized. Any CRISPR/Cas system that is capable of altering a target polynucleotide sequence (e.g., target gene) in a cell can be used. Such CRISPR/Cas systems can employ a variety of Cas proteins (Haft et al. PLoS Comput Biol. 2005; 1(6)e60). The molecular machinery of such Cas proteins that allows the CRISPR/Cas system to alter target polynucleotide sequences in cells include RNA binding proteins, endo- and exo-nucleases, helicases, and polymerases. In some embodiments, alternatives to CRISPR/Cas systems can be used to alter the target polynucleotide sequences in a cell including, but not limited to, site-specific recombinases (SSRs), zinc finger nucleases, TALE-nucleases, meganucleases (also known as homing endonucleases), and the like.

[0376] CRISPR systems can be divided into two main classes, Class 1 and Class 2, which are further classified into different types and sub-types. The classification of the CRISPR systems is based on the effector Cas proteins that are capable of cleaving specific nucleic acids. In Class 1 CRISPR systems the effector module consists of a multi-protein complex, whereas Class 2 systems only use one effector protein. Class 1 CRISPR includes Types I, III, and IV and Class 2 CRISPR includes Types II, V, and VI. While any of these types of CRISPR systems may be used in accordance with the present invention, there are three types of CRISPR systems which incorporate RNAs and Cas proteins that are preferred for use in accordance with the present invention: Types I (exemplified by Cas3), II (exemplified by Cas9), and III (exemplified by Cas10). The Type II CRISPR is one of the most well-characterized systems. In some embodiments, the CRISPR/Cas system is a CRISPR type I system. In some embodiments, the CRISPR/Cas system is a CRISPR type II system. In some embodiments, the CRISPR/Cas system is a CRISPR type V system. In some embodiments, the CRISPR/Cas system is a CRISPR type VI system.

[0377] The CRISPR/Cas systems of the present technology can be used to alter any target polynucleotide sequence in a cell. Those skilled in the art will readily appreciate that desirable target polynucleotide sequences to be altered in any particular cell may correspond to any genomic sequence for which expression of the genomic sequence is associated with a disorder or otherwise facilitates entry of a pathogen into the cell. For example, a desirable target polynucleotide sequence to alter in a cell may be a polynucleotide sequence corresponding to a genomic sequence which contains a disease associated single polynucleotide polymorphism. In such example, the CRISPR/Cas systems of the present technology can be used to correct the disease associated SNP in a cell by replacing it with a wild-type allele. As another example, a polynucleotide sequence of a target gene which is responsible for entry or proliferation of a pathogen into a cell may be a suitable target for deletion or insertion to disrupt the function of the target gene to prevent the pathogen from entering the cell or proliferating inside the cell.

[0378] In some embodiments, the target polynucleotide sequence is a genomic sequence. In some embodiments, the target polynucleotide sequence is a human genomic sequence. In some embodiments, the target polynucleotide sequence is a mammalian genomic sequence. In some embodiments, the target polynucleotide sequence is a vertebrate genomic sequence.

[0379] In some embodiments, a CRISPR/Cas system of the present invention includes a Cas protein and at least one to two ribonucleic acids (e.g., guide RNAs or guide RNA target sequences) that are capable of directing the Cas protein to and hybridizing to a target motif of a target polynucleotide sequence. As used herein, “protein” and “polypeptide” are used interchangeably to refer to a series of amino acid residues joined by peptide bonds (i.e., a polymer of amino acids) and include modified amino acids (e.g., phosphorylated, glycated, glycosylated, etc.) and amino acid analogs. Exemplary polypeptides or proteins include gene products, naturally occurring proteins, homologs, paralogs, fragments and other equivalents, variants, and analogs of the above.

[0380] In some embodiments, a Cas protein comprises one or more amino acid substitutions or modifications. In some embodiments, the one or more amino acid substitutions comprises a conservative amino acid substitution. In some instances, substitutions and/or modifications can prevent or reduce proteolytic degradation and/or extend the half-life of the polypeptide in a cell. In some embodiments, the Cas protein can comprise a peptide bond replacement (e.g., urea, thiourea, carbamate, sulfonyl urea, etc.). In some embodiments, the Cas protein can comprise a naturally occurring amino acid. In some embodiments, the Cas protein can comprise an alternative amino acid (e.g., D-amino acids, beta-amino acids, homocysteine, phosphoserine, etc.). In some embodiments, a Cas protein can comprise a modification to include a moiety (e.g., PEGylation, glycosylation, lipidation, acetylation, end-capping, etc.).

[0381] In some embodiments, a Cas protein comprises a core Cas protein. Exemplary Cas core proteins include, but are not limited to Cas1, Cas1B, Cas2, Cas3, Cas4, Cas5, Cas5d, Cas5t, Cas5h, Cas5a, Cas6, Cas7, Cas8, Cas9 (also known as Csn1 or Csx12), Cas10, Cas11, Cas12, Cas13, Csy1, Csy2, Csy3, Csy4, Cse1, Cse2, Cse3, Cse4, Cse5e, Csc1, Csc2, Csa5, Csn1, Csn2, Csm1, Csm2, Csm3, Csm4, Csm5, Csm6, Cmr1, Cmr3, Cmr4, Cmr5, Cmr6, Csb1, Csb2, Csb3, Csx17, Csx14, Csx10, Csx16, CsaX, Csx3, Csx1, Csx1S, Csf1, Csf2, CsO, Csf4, Csd1, Csd2, Cst1, Cst2, Csh1, Csh2, Csa1, Csa2, Csa3, Csa4, Csa5, homologues thereof, or modified versions thereof. In some embodiments, a Cas protein comprises a Cas protein of an E. coli subtype (also known as CASS2). Exemplary Cas proteins of the E. Coli subtype include, but are not limited to Cse1, Cse2, Cse3, Cse4, and Cas5e. In some embodiments, a Cas protein comprises a Cas protein of the Ypest subtype (also known as CASS3). Exemplary Cas proteins of the Ypest subtype include, but are not limited to Csy1, Csy2, Csy3, and Csy4. In some embodiments, a Cas protein comprises a Cas protein of the Nmeni subtype (also known as CASS4). Exemplary Cas proteins of the Nmeni subtype include, but are not limited to Csn1 and Csn2. In some embodiments, a Cas protein comprises a Cas protein of the Dvulg subtype (also known as CASS1). Exemplary Cas proteins of the Dvulg subtype include Csd1, Csd2, and Cas5d. In some embodiments, a Cas protein comprises a Cas protein of the Tneap subtype (also known as CASS7). Exemplary Cas proteins of the Tneap subtype include, but are not limited to, Cst1, Cst2, Cas5t. In some embodiments, a Cas protein comprises a Cas protein of the Hmari subtype. Exemplary Cas proteins of the Hmari subtype include, but are not limited to Csh1, Csh2, and Cas5h. In some embodiments, a Cas protein comprises a Cas protein of the Apern subtype (also known as CASS5). Exemplary Cas proteins of the Apern subtype include, but are not limited to Csa1, Csa2, Csa3, Csa4, Csa5, and Cas5a. In some embodiments, a Cas protein comprises a Cas protein of the Mtube subtype (also known as CASS6). Exemplary Cas proteins of the Mtube subtype include, but are not limited to Csm1, Csm2, Csm3, Csm4, and Csm5. In some embodiments, a Cas protein comprises a RAMP module Cas protein. Exemplary RAMP module Cas proteins include, but are not limited to, Cmr1, Cmr2, Cmr3, Cmr4, Cmr5, and Cmr6. See, e.g., Klompe et al., Nature 571, 219-225 (2019); Strecker et al., Science 365, 48-53 (2019).

[0382] In some embodiments, a Cas protein comprises any one of the Cas proteins described herein or a functional portion thereof. As used herein, “functional portion” refers to a portion of a peptide which retains its ability to complex with at least one ribonucleic acid (e.g., guide RNA (gRNA)) and cleave a target polynucleotide sequence. In some embodiments, the functional portion comprises a combination of operably linked Cas9 protein functional domains selected from the group consisting of a DNA binding domain, at least one RNA binding domain, a helicase domain, and an endonuclease domain. In some embodiments, the functional portion comprises a combination of operably linked Cas12a (also known as Cpf1) protein functional domains selected from the group consisting of a DNA binding domain, at least one RNA binding domain, a helicase domain, and an endonuclease domain. In some embodiments, the functional domains form a complex. In some embodiments, a functional portion of the Cas9 protein comprises a functional portion of a RuvC-like domain. In some embodiments, a functional portion of the Cas9 protein comprises a functional portion of the HNH nuclease domain. In some embodiments, a functional portion of the Cas12a protein comprises a functional portion of a RuvC-like domain.

[0383] In some embodiments, exogenous Cas protein can be introduced into the cell in polypeptide form. In certain embodiments, Cas proteins can be conjugated to or fused to a cell-penetrating polypeptide or cell-penetrating peptide. As used herein, “cell-penetrating polypeptide” and “cell-penetrating peptide” refers to a polypeptide or peptide, respectively, which facilitates the uptake of molecule into a cell. The cell-penetrating polypeptides can contain a detectable label.

[0384] In certain embodiments, Cas proteins can be conjugated to or fused to a charged protein (e.g., that carries a positive, negative or overall neutral electric charge). Such linkage may be covalent. In some embodiments, the Cas protein can be fused to a superpositively charged GFP to significantly increase the ability of the Cas protein to penetrate a cell (Cronican et al. ACS Chem Biol. 2010; 5(8):747-52). In certain embodiments, the Cas protein can be fused to a protein transduction domain (PTD) to facilitate its entry into a cell. Exemplary PTDs include Tat, oligoarginine, and penetratin. In some embodiments, the Cas9 protein comprises a Cas9 polypeptide fused to a cell-penetrating peptide. In some embodiments, the Cas9 protein comprises a Cas9 polypeptide fused to a PTD. In some embodiments, the Cas9 protein comprises a Cas9 polypeptide fused to a tat domain. In some embodiments, the Cas9 protein comprises a Cas9 polypeptide fused to an oligoarginine domain. In some embodiments, the Cas9 protein comprises a Cas9 polypeptide fused to a penetratin domain. In some embodiments, the Cas9 protein comprises a Cas9 polypeptide fused to a superpositively charged GFP. In some embodiments, the Cas12a protein comprises a Cas12a polypeptide fused to a cell-penetrating peptide. In some embodiments, the Cas12a protein comprises a Cas12a polypeptide fused to a PTD. In some embodiments, the Cas12a protein comprises a Cas12a polypeptide fused to a tat domain. In some embodiments, the Cas12a protein comprises a Cas12a polypeptide fused to an oligoarginine domain. In some embodiments, the Cas12a protein comprises a Cas12a polypeptide fused to a penetratin domain. In some embodiments, the Cas12a protein comprises a Cas12a polypeptide fused to a superpositively charged GFP.

[0385] In some embodiments, the Cas protein can be introduced into a cell containing the target polynucleotide sequence in the form of a nucleic acid encoding the Cas protein. The process of introducing the nucleic acids into cells can be achieved by any suitable technique. Suitable techniques include calcium phosphate or lipid-mediated transfection, electroporation, and transduction or infection using a viral vector. In some embodiments, the nucleic acid comprises DNA. In some embodiments, the nucleic acid comprises a modified DNA, as described herein. In some embodiments, the nucleic acid comprises mRNA. In some embodiments, the nucleic acid comprises a modified mRNA, as described herein (e.g., a synthetic, modified mRNA).

[0386] Cas9 mediates genome editing at sites complementary to a 20-nucleotide sequence (e.g., protospacer) in a bound guide RNA. In addition, target sites must include a protospacer adjacent motif (PAM) at the 3′ end adjacent to the 20-nucleotide target site; for Streptococcus pyogenes Cas9, the PAM sequence is NGG. The methods of the present invention contemplate the use of any ribonucleic acid that is capable of directing a Cas protein to and hybridizing to a target motif of a target polynucleotide sequence. In some embodiments, at least one of the ribonucleic acids comprises tracrRNA. In some embodiments, at least one of the ribonucleic acids comprises CRISPR RNA (crRNA). In some embodiments, a single ribonucleic acid comprises a guide RNA that directs the Cas protein to and hybridizes to a target motif of the target polynucleotide sequence in a cell. In some embodiments, at least one of the ribonucleic acids comprises a segment that directs the Cas protein to and hybridizes to a target motif of the target polynucleotide sequence in a cell. In some embodiments, both of the one to two ribonucleic acids comprise a segment that directs the Cas protein to and hybridizes to a target motif of the target, polynucleotide sequence in a cell, The ribonucleic acids of the present invention can be selected to hybridize to a variety of different target motifs, depending on the particular CRISPR/Cas system employed, and the sequence of the target polynucleotide, as will be appreciated by those skilled in the art. The one to two ribonucleic acids can also be selected to minimize hybridization with nucleic acid sequences other than the target polynucleotide sequence. In some embodiments, the one to two ribonucleic acids, hybridize to a target motif that contains at least two mismatches when compared with all other genomic nucleotide sequences in the cell. gRNA molecules generally include a targeting domain and a tracr. In some embodiments the targeting domain and tracr are disposed on a single polynucleotide. In some embodiments, a gRNA molecule consists of a single contiguous polynucleotide molecule, referred to herein as a “single guide RNA” or “sgRNA” and the like. In other embodiments, a gRNA molecule consists of a plurality, usually two, polynucleotide molecules, which are themselves capable of association, usually through hybridization, referred to herein as a “dual guide RNA” or “dgRNA, “two-part guide RNA”, and the like.

[0387] It has been suggested that complementarity between guide RNA and target DNA is required in the 7-12 base pairs adjacent to the PAM end of the target site (3′ end of the guide RNA) and mismatches are tolerated at the non-PAM end (5′ end of the guide RNA). In some embodiments, there are at least 1 mismatch between the DNA-binding segment of the guide RNA and the target DNA. In some embodiments, there are at least 2 mismatches between the DNA-binding segment of the guide RNA and the target DNA. In some embodiments, there are at least 3 mismatches between the DNA-binding segment of the guide RNA and the target DNA. In some embodiments, there are at least 4 mismatches between the DNA-binding segment of the guide RNA and the target DNA. In some embodiments, there are at least 5 mismatches between the DNA-binding segment of the guide RNA and the target DNA. In some embodiments, the Cas protein is complexed with one to two ribonucleic acid sequences (e.g., gRNAs). In some embodiments, the Cas protein is complexed with two ribonucleic acid sequences. In some embodiments, the Cas protein is complexed with one ribonucleic acid sequence. In some embodiments, the Cas protein is encoded by a modified nucleic acid, as described herein (e.g., a synthetic, modified mRNA).

[0388] The methods of the present invention contemplate the use of any ribonucleic acid sequence that is capable of directing a Cas protein to and hybridizing to a target motif of a target polynucleotide sequence. In some embodiments, a single guide RNA is used. In some embodiments, dual guide RNAs are used. In some embodiments, at least one of the ribonucleic acid sequence comprises tracrRNA. In some embodiments, at least one of the ribonucleic acid sequence comprises CRISPR RNA (crRNA). In some embodiments, a single ribonucleic acid comprises a guide RNA that directs the Cas protein to and hybridizes to a target motif of the target polynucleotide sequence in a cell. In some embodiments, the ribonucleic acid sequence is a guide RNA comprising a crRNA and tracrRNA that directs the Cas protein to and hybridizes to a target motif of the target polynucleotide sequence in a cell.

[0389] A ribonucleic acid sequence of a guide RNA that is specific to the target sequence (e.g., protospacer) can be designed by replacing thymines with uracils for the crRNA and adding a tracrRNA sequence. A guide RNA does not include the PAM sequence which serves as a binding signal for the Cas protein. From the target sequence, a guide RNA can be designed comprising a crRNA that is complementary to the target sequence. Guide RNA sequences are also designed with minimal off-targeting binding and cleavage. In some instances, off-target prediction methods and algorithms, including those described in Hsu et al., Nature Biotechnology, 2013, 31, 827-832, are employed to evaluate guide RNA target sequences. Provided herein are guide RNAs comprising an RNA sequence corresponding to gRNA targets disclosed in any of the tables and Figures.

[0390] The ribonucleic acids of the present invention can be selected to hybridize to a variety of different target motifs, depending on the particular CRISPR/Cas system employed, and the sequence of the target polynucleotide, as will be appreciated by those skilled in the art. The one to two ribonucleic acids can also be selected to minimize hybridization with nucleic acid sequences other than the target polynucleotide sequence. In some embodiments, the one to two ribonucleic acids hybridize to a target motif that contains at least two mismatches when compared with all other genomic nucleotide sequences in the cell. In some embodiments, the one to two ribonucleic acids hybridize to a target motif that contains at least one mismatch when compared with all other genomic nucleotide sequences in the cell. In some embodiments, the one to two ribonucleic acids are designed to hybridize to a target motif immediately adjacent to a deoxyribonucleic acid motif recognized by the Cas protein. In some embodiments, each of the one to two ribonucleic acids are designed to hybridize to target motifs immediately adjacent to deoxyribonucleic acid motifs recognized by the Cas protein which flank a mutant allele located between the target motifs.

[0391] In some embodiments, each of the one to two ribonucleic acids comprises guide RNAs that directs the Cas protein to and hybridizes to a target motif of the target polynucleotide sequence in a cell.

[0392] In some embodiments, one or two ribonucleic acids (e.g., guide RNAs) are complementary to and/or hybridize to sequences on the same strand of a target polynucleotide sequence. In some embodiments, one or two ribonucleic acids (e.g., guide RNAs) are complementary to and/or hybridize to sequences on the opposite strands of a target polynucleotide sequence. In some embodiments, the one or two ribonucleic acids (e.g., guide RNAs) are not complementary to and/or do not hybridize to sequences on the opposite strands of a target polynucleotide sequence. In some embodiments, the one or two ribonucleic acids (e.g., guide RNAs) are complementary to and/or hybridize to overlapping target motifs of a target polynucleotide sequence. In some embodiments, the one or two ribonucleic acids (e.g., guide RNAs) are complementary to and/or hybridize to offset target motifs of a target polynucleotide sequence.

[0393] In some embodiments, a target nucleic acid sequence for genome editing may have a specific sequence on its 3′ end, named the protospacer adjacent motif or protospacer associated motif (PAM). The PAM is present in the targeted nucleic acid sequence but not in the crRNA that is produced to target it. In some embodiments, the proto-spacer adjacent motif (PAM) may correspond to 2 to 5 nucleotides starting immediately or in the vicinity of the proto-spacer at the leader distal end. The sequence and the location of the PAM vary among the different systems. Non-limiting examples of PAM motif include NNAGAA (SEQ ID NO:98), NAG, NGG, NGGNG (SEQ ID NO:99), AWG, CC, CC, CCN, TCN, and TTC. Different Type II CRISPR systems have differing PAM requirements. For example, the S. pyogenes system requires an NGG sequence, where N can be any nucleotides. In some cases, a Cas9 protein can be engineered to recognize specific PAM motifs or to recognize a non-natural PAM motif. In some instances, the selected target sequence may comprise a smaller or a larger PAM motif with any combinations of amino acids. In some embodiments, a selected target sequence comprise a PAM motif which comprises at least 3, preferably, 4, more preferably 5 nucleotides recognized by a Cas9 protein or a variant thereof.

[0394] In some embodiments, nucleic acids encoding Cas protein and nucleic acids encoding the at least one to two ribonucleic acids are introduced into a cell via viral transduction (e.g., lentiviral transduction). In some embodiments, the Cas protein is complexed with 1-2 ribonucleic acids. In some embodiments, the Cas protein is complexed with two ribonucleic acids. In some embodiments, the Cas protein is complexed with one ribonucleic acid. In some embodiments, the Cas protein is encoded by a modified nucleic acid, as described herein (e.g., a synthetic, modified mRNA). In some embodiments, a guide RNA comprises a peptide nucleic acid (PNA) or a locked nucleic acid (LNA).

[0395] Exemplary gRNA sequences useful for CRISPR/Cas-based targeting of genes described herein are provided in Table 1. The sequences can be found in WO2016/183041 filed May 9, 2016, the disclosure including the Tables, Appendices, and Sequence Listing is incorporated herein by reference in its entirety.

[0396] Additional disclosures of CRISPR/Cas system are provided in U.S. Pat. Nos. 8,697,359; 8,993,233; 8,795,965; 8,771,945; 8,889,356; 8,865,406; 8,999,641; 8,945,839; 8,932,814; 8,871,445; 8,906,616; and U.S. Pat. No. 8,895,308, Yan et al., Science 363, 88-91 (2019), Moon et al. Experimental & Molecular Medicine (2019) 51:130, and Tachibana, Science (2019; www.sciencemag.org/features/2019/09/beyond-crispr-what-s-current-and-upcoming-genome-editing), the disclosures including the figures, figure legends, and description of methods are incorporated herein by reference in their entirety. Exemplary gRNA sequences useful for CRISPR/Cas-based targeting of genes described herein are provided in Table 5. The sequences can be found in WO2016183041 filed May 9, 2016, the disclosure including the Tables, Appendices, and Sequence Listing is incorporated herein by reference in its entirety.

TABLE 5
Exemplary gRNA sequences useful for targeting genes

| Gene Name | SEQ ID NO: | WO2016183041 |
|---|---|---|
| HLA-A | SEQ ID NOs: 2-1418 | Table 8, Appendix 1 |
| HLA-B | SEQ ID NOs: 1419-3277 | Table 9, Appendix 2 |
| HLA-C | SEQ ID NOs: 3278-5183 | Table 10, Appendix 3 |
| RFX-ANK | SEQ ID NOs: 95636-102318 | Table 11, Appendix 4 |
| NFY-A | SEQ ID NOs: 102319-121796 | Table 13, Appendix 6 |
| RFX5 | SEQ ID NOs: 85645-90115 | Table 16, Appendix 9 |
| RFX-AP | SEQ ID NOs: 90116-95635 | Table 17, Appendix 10 |
| NFY-B | SEQ ID NOs: 121797-135112 | Table 20, Appendix 13 |
| NFY-C | SEQ ID NOs: 135113-176601 | Table 22, Appendix 15 |
| IRF1 | SEQ ID NOs: 176602-182813 | Table 23, Appendix 16 |
| TAP1 | SEQ ID NOs: 182814-188371 | Table 24, Appendix 17 |
| CIITA | SEQ ID NOs: 5184-36352 | Table 12, Appendix 5 |
| B2M | SEQ ID NOs: 81240-85644 | Table 15, Appendix 8 |
| NLRC5 | SEQ ID NOs: 36353-81239 | Table 14, Appendix 7 |
| CD47 | SEQ ID NOs: 200784-231885 | Table 29, Appendix 22 |
| HLA-E | SEQ ID NOs: 189859-193183 | Table 19, Appendix 12 |
| HLA-F | SEQ ID NOs: 688808-699754 | Table 45, Appendix 38 |
| HLA-G | SEQ ID NOs: 188372-189858 | Table 18, Appendix 11 |
| PD-L1 | SEQ ID NOs: 193184-200783 | Table 21, Appendix 14 |

[0397] In some embodiments, the cells of the invention are made using Transcription Activator-Like Effector Nucleases (TALEN) methodologies.

[0398] By a “TALE-nuclease” (TALEN) is intended a fusion protein consisting of a nucleic acid-binding domain typically derived from a Transcription Activator Like Effector (TALE) and one nuclease catalytic domain to cleave a nucleic acid target sequence. The catalytic domain is preferably a nuclease domain and more preferably a domain having endonuclease activity, like for instance I-TevI, ColE7, NucA and Fok-I. TALE-nucleases are specific reagents because they need to bind DNA by pairs under obligatory heterodimeric form to obtain dimerization of the cleavage domain such as Fok-1. Left and right heterodimer members each recognizes a different nucleic sequences of about 14 to 20 bp, together spanning target sequences of 30 to 50 bp overall specificity. To induce site-specific mutation, two individual TALEN arms, separated by a 14-20 base pair spacer region, bring FokI monomers in close proximity to dimerize and produce a targeted double-strand break. In a particular embodiment, the TALE domain can be fused to a meganuclease like for instance I-CreI and I-OnuI or functional variant thereof. In some embodiments, the TALE-nucleases are heterodimeric nucleases. In some embodiments, the TALE-nucleases are monomeric TALE-nucleases. A monomeric TALE-Nuclease is a TALE-nuclease that does not require dimerization for specific recognition and cleavage, such as the fusions of engineered TAL repeats with the catalytic domain of I-TevI described in WO2012138927. Transcription Activator like Effector (TALE) are proteins from the bacterial species Xanthomonas comprise a plurality of repeated sequences, each repeat comprising di-residues in position 12 and 13 (RVD) that are specific to each nucleotide base of the nucleic acid targeted sequence. Binding domains with similar modular base-per-base nucleic acid binding properties (MBBBD) can also be derived from new modular proteins recently discovered by the applicant in a different bacterial species. The new modular proteins have the advantage of displaying more sequence variability than TAL repeats. Preferably, RVDs associated with recognition of the different nucleotides are HD for recognizing C, NG for recognizing T, NI for recognizing A, NN for recognizing G or A, NS for recognizing A, C, G or T, HG for recognizing T, IG for recognizing T, NK for recognizing G, HA for recognizing C, ND for recognizing C, HI for recognizing C, HN for recognizing G, NA for recognizing G, SN for recognizing G or A and YG for recognizing T, TL for recognizing A, VT for recognizing A or G and SW for recognizing A. In another embodiment, critical amino acids 12 and 13 can be mutated towards other amino acid residues in order to modulate their specificity towards nucleotides A, T, C and G and in particular to enhance this specificity. TALEN kits are sold commercially.

[0399] In some embodiments, the cells are manipulated using zinc finger nuclease (ZFN). A “zinc finger binding protein” is a protein or polypeptide that binds DNA, RNA and/or protein, preferably in a sequence-specific manner, as a result of stabilization of protein structure through coordination of a zinc ion. The term zinc finger binding protein is often abbreviated as zinc finger protein or ZFP. The individual DNA binding domains are typically referred to as “fingers.” A ZFP has least one finger, typically two fingers, three fingers, or six fingers. Each finger binds from two to four base pairs of DNA, typically three or four base pairs of DNA. A ZFP binds to a nucleic acid sequence called a target site or target segment. Each finger typically comprises an approximately 30 amino acid, zinc-chelating, DNA-binding subdomain. Studies have demonstrated that a single zinc finger of this class consists of an alpha helix containing the two invariant histidine residues co-ordinated with zinc along with the two cysteine residues of a single beta turn (see, e.g., Berg & Shi, Science 271:1081-1085 (1996)).

[0400] In some embodiments, the cells of the invention are made using a homing endonuclease. Such homing endonucleases are well-known to the art (Stoddard 2005). Homing endonucleases recognize a DNA target sequence and generate a single- or double-strand break. Homing endonucleases are highly specific, recognizing DNA target sites ranging from 12 to 45 base pairs (bp) in length, usually ranging from 14 to 40 bp in length. The homing endonuclease according to the invention may for example correspond to a LAGLIDADG endonuclease, to a HNH endonuclease, or to a GIY-YIG endonuclease. Preferred homing endonuclease according to the present invention can be an I-CreI variant.

[0401] In some embodiments, the cells of the invention are made using a meganuclease. Meganucleases are by definition sequence-specific endonucleases recognizing large sequences (Chevalier, B. S. and B. L. Stoddard, Nucleic Acids Res., 2001, 29, 3757-3774). They can cleave unique sites in living cells, thereby enhancing gene targeting by 1000-fold or more in the vicinity of the cleavage site (Puchta et al., Nucleic Acids Res., 1993, 21, 5034-5040; Rouet et al., Mol. Cell. Biol., 1994, 14, 8096-8106; Choulika et al., Mol. Cell. Biol., 1995, 15, 1968-1973; Puchta et al., Proc. Natl. Acad. Sci. USA, 1996, 93, 5055-5060; Sargent et al., Mol. Cell. Biol., 1997, 17, 267-77; Donoho et al., Mol. Cell. Biol, 1998, 18, 4070-4078; Elliott et al., Mol. Cell. Biol., 1998, 18, 93-101; Cohen-Tannoudji et al., Mol. Cell. Biol., 1998, 18, 1444-1448).

[0402] In some embodiments, the cells of the invention are made using RNA silencing or RNA interference (RNAi) to knockdown (e.g., decrease, eliminate, or inhibit) the expression of a polypeptide such as a hypoimmunity factor. Useful RNAi methods include those that utilize synthetic RNAi molecules, short interfering RNAs (siRNAs), PIWI-interacting NRAs (piRNAs), short hairpin RNAs (shRNAs), microRNAs (miRNAs), and other transient knockdown methods recognized by those skilled in the art. Reagents for RNAi including sequence specific shRNAs, siRNA, miRNAs and the like are commercially available. Reagents for RNAi including sequence specific shRNAs, siRNA, miRNAs and the like are commercially available. For instance, CIITA can be knocked down in a pluripotent stem cell by introducing a CIITA siRNA or transducing a CIITA shRNA-expressing virus into the cell. In some embodiments, RNA interference is employed to reduce or inhibit the expression of at least one selected from the group consisting of CIITA, B2M, ABO, RHD and FUT1.

[0403] In some embodiments, the rare-cutting endonuclease is introduced into a cell containing the target polynucleotide sequence in the form of a nucleic acid encoding a rare-cutting endonuclease. The process of introducing the nucleic acids into cells can be achieved by any suitable technique. Suitable techniques include calcium phosphate or lipid-mediated transfection, electroporation, and transduction or infection using a viral vector. In some embodiments, the nucleic acid comprises DNA. In some embodiments, the nucleic acid comprises a modified DNA, as described herein. In some embodiments, the nucleic acid comprises mRNA. In some embodiments, the nucleic acid comprises a modified mRNA, as described herein (e.g., a synthetic, modified mRNA).

[0404] The process of introducing the nucleic acids into cells can be achieved by any suitable technique. The gene editing system used herein, such as CRISPR, TALEN, and ZFN systems, can be delivered into a cell through any suitable technique, including but not limited to calcium phosphate or lipid-mediated transfection, electroporation, and transduction or infection using a viral vector. In some embodiment, the gene editing system of the present invention is delivered to a cell via electroporation. In some embodiments, the electroporation system is a flow electroporation system. An example of a suitable flow electroporation system suitable for use with some embodiments of the present invention is the commercially-available MaxCyte STX system. There are several alternative commercially-available electroporation instruments which may be suitable for use with the present invention, such as the AgilePulse system or ECM 830 available from BTX-Harvard Apparatus, Cellaxess Elektra (Cellectricon), Nucleofector (Lonza/Amaxa), GenePulser MXcell (BIORAD), iPorator-96 (Primax) or siPORTer96 (Ambion). In some embodiments, the electroporation system forms a closed, sterile system for a cell. In some embodiments, the electroporation system is a pulsed electroporation system as described herein, and forms a closed, sterile system for a cell.

[0405] E. Overexpression of Tolerogenic Factors

[0406] For all of the technologies described herein, well-known recombinant techniques can be used to generate recombinant nucleic acids. In certain aspects, overexpression of tolerogenic factors is accomplished utilizing regulatory sequences within an expression construct. In certain embodiments, the recombinant nucleic acids encoding a tolerogenic factor may be operably linked to one or more regulatory nucleotide sequences in an expression construct. Regulatory nucleotide sequences will generally be appropriate for the host cell and recipient subject to be treated. Numerous types of appropriate expression vectors and suitable regulatory sequences are known in the art for a variety of host cells and are compatible with the technologies disclosed herein. Typically, the one or more regulatory nucleotide sequences may include, but are not limited to, promoter sequences, leader or signal sequences, ribosomal binding sites, transcriptional start and termination sequences, translational start and termination sequences, and enhancer or activator sequences. Constitutive or inducible promoters as known in the art are also contemplated. The promoters may be either naturally occurring promoters, or hybrid promoters that combine elements of more than one promoter. An expression construct may be present in a cell on an episome, such as a plasmid, or the expression construct may be inserted into a chromosome. In a specific embodiment, the expression vector includes a selectable marker gene to allow the selection of transformed host cells. Certain embodiments include an expression vector comprising a nucleotide sequence encoding a variant polypeptide operably linked to at least one regulatory sequence. Regulatory sequences for use herein include promoters, enhancers, and other expression control elements. In certain embodiments, an expression vector is designed for the choice of the host cell to be transformed, the particular variant polypeptide desired to be expressed, the vector's copy number, the ability to control that copy number, and/or the expression of any other protein encoded by the vector, such as antibiotic markers.

[0407] Examples of suitable mammalian promoters include, for example, promoters from the following genes: elongation factor 1 alpha (EF1α) promoter, ubiquitin/S27a promoter of the hamster (WO 97/15664), Simian vacuolating virus 40 (SV40) early promoter, adenovirus major late promoter, mouse metallothionein-I promoter, the long terminal repeat region of Rous Sarcoma Virus (RSV), mouse mammary tumor virus promoter (MMTV), Moloney murine leukemia virus Long Terminal repeat region, and the early promoter of human Cytomegalovirus (CMV). Examples of other heterologous mammalian promoters are the actin, immunoglobulin or heat shock promoter(s). In additional embodiments, promoters for use in mammalian host cells can be obtained from the genomes of viruses such as polyoma virus, fowlpox virus (UK 2,211,504 published 5 Jul. 1989), bovine papilloma virus, avian sarcoma virus, cytomegalovirus, a retrovirus, hepatitis-B virus and Simian Virus 40 (SV40). In further embodiments, heterologous mammalian promoters are used. Examples include the actin promoter, an immunoglobulin promoter, and heat-shock promoters. The early and late promoters of SV40 are conveniently obtained as an SV40 restriction fragment which also contains the SV40 viral origin of replication (Fiers et al, Nature 273: 113-120 (1978)). The immediate early promoter of the human cytomegalovirus is conveniently obtained as a HindIII restriction enzyme fragment (Greenaway et al, Gene 18: 355-360 (1982)). The foregoing references are incorporated by reference in their entirety.

[0408] The process of introducing the polynucleotides described herein into cells can be achieved by any suitable technique. Suitable techniques include calcium phosphate or lipid-mediated transfection, electroporation, and transduction or infection using a viral vector. In some embodiments, the polynucleotides are introduced into a cell via viral transduction (e.g., lentiviral transduction).

[0409] Once altered, the presence of expression of any of the molecule described herein can be assayed using known techniques, such as Western blots, ELISA assays, FACS assays, and the like.

[0410] F. Assays for Hypoimmunogenicity Phenotypes and Retention of Pluripotency

[0411] Once the hypoimmunogenic cells have been generated, they may be assayed for their hypoimmunogenicity and/or retention of pluripotency as is described in WO2016183041 and WO2018132783.

[0412] In some embodiments, hypoimmunogenicity is assayed using a number of techniques as exemplified in FIG. 13 and FIG. 15 of WO2018132783. These techniques include transplantation into allogeneic hosts and monitoring for hypoimmunogenic pluripotent cell growth (e.g. teratomas) that escape the host immune system. In some instances, hypoimmunogenic pluripotent cell derivatives are transduced to express luciferase and can then followed using bioluminescence imaging. Similarly, the T cell and/or B cell response of the host animal to such cells are tested to confirm that the cells do not cause an immune reaction in the host animal. T cell function is assessed by ELISpot, ELISA, FACS, PCR, or mass cytometry (CYTOF). B cell response or antibody response is assessed using FACS or Luminex. Additionally or alternatively, the cells may be assayed for their ability to avoid innate immune responses, e.g., NK cell killing, as is generally shown in FIGS. 14 and 15 of WO2018132783.

[0413] In some embodiments, the immunogenicity of the cells is evaluated using T cell immunoassays such as T cell proliferation assays, T cell activation assays, and T cell killing assays recognized by those skilled in the art. In some cases, the T cell proliferation assay includes pretreating the cells with interferon-gamma and coculturing the cells with labelled T cells and assaying the presence of the T cell population (or the proliferating T cell population) after a preselected amount of time. In some cases, the T cell activation assay includes coculturing T cells with the cells outlined herein and determining the expression levels of T cell activation markers in the T cells.

[0414] In vivo assays can be performed to assess the immunogenicity of the cells outlined herein. In some embodiments, the survival and immunogenicity of hypoimmunogenic cells is determined using an allogenic humanized immunodeficient mouse model. In some instances, the hypoimmunogenic pluripotent stem cells are transplanted into an allogenic humanized NSG-SGM3 mouse and assayed for cell rejection, cell survival, and teratoma formation. In some instances, grafted hypoimmunogenic pluripotent stem cells or differentiated cells thereof display long-term survival in the mouse model.

[0415] Additional techniques for determining immunogenicity including hypoimmunogenicity of the cells are described in, for example, Deuse et al., Nature Biotechnology, 2019, 37, 252-258 and Han et al., Proc Natl Acad Sci USA, 2019, 116(21), 10441-10446, the disclosures including the figures, figure legends, and description of methods are incorporated herein by reference in their entirety.

[0416] Similarly, the retention of pluripotency is tested in a number of ways. In one embodiment, pluripotency is assayed by the expression of certain pluripotency-specific factors as generally described herein and shown in FIG. 29 of WO2018132783. Additionally or alternatively, the pluripotent cells are differentiated into one or more cell types as an indication of pluripotency.

[0417] As will be appreciated by those in the art, the successful reduction of the MHC I function (HLA I when the cells are derived from human cells) in the pluripotent cells can be measured using techniques known in the art and as described below; for example, FACS techniques using labeled antibodies that bind the HLA complex; for example, using commercially available HLA-A, B, C antibodies that bind to the alpha chain of the human major histocompatibility HLA Class I antigens.

[0418] In addition, the cells can be tested to confirm that the HLA I complex is not expressed on the cell surface. This may be assayed by FACS analysis using antibodies to one or more HLA cell surface components as discussed above.

[0419] The successful reduction of the MHC II function (HLA II when the cells are derived from human cells) in the pluripotent cells or their derivatives can be measured using techniques known in the art such as Western blotting using antibodies to the protein, FACS techniques, RT-PCR techniques, etc.

[0420] In addition, the cells can be tested to confirm that the HLA II complex is not expressed on the cell surface. Again, this assay is done as is known in the art (See FIG. 21 of WO2018132783, for example) and generally is done using either Western Blots or FACS analysis based on commercial antibodies that bind to human HLA Class II HLA-DR, DP and most DQ antigens.

[0421] In addition to the reduction of HLA I and II (or MHC I and II), the hypoimmunogenic cells of the invention have a reduced susceptibility to macrophage phagocytosis and NK cell killing. The resulting hypoimmunogenic cells “escape” the immune macrophage and innate pathways due to the expression of one or more CD47 transgenes.

[0422] G. Maintenance of Hypoimmunogenic Pluripotent Stem Cells

[0423] Once the hypoimmunogenic pluripotent stem cells have been generated, they can be maintained an undifferentiated state as is known for maintaining iPSCs. For example, the cells can be cultured on matrigel using culture media that prevents differentiation and maintains pluripotency. In addition, they can be in culture medium under conditions to maintain pluripotency. Methods for culturing pluripotent stem cells are recognized in the art and are described, for example, in WO2016183041 and WO2018132783.

[0424] H. Differentiation of Hypoimmunogenic Pluripotent Stem Cells

[0425] The invention provides hypoimmunogenic pluripotent cells that are differentiated into different cell types for subsequent transplantation into subjects. As will be appreciated by those in the art, the methods for differentiation depend on the desired cell type using known techniques. The cells can be differentiated in suspension and then put into a gel matrix form, such as matrigel, gelatin, or fibrin/thrombin forms to facilitate cell survival. In some cases, differentiation is assayed as is known in the art, generally by evaluating the presence of cell-specific markers.

[0426] In some embodiments, the hypoimmunogenic pluripotent cells are differentiated into hepatocytes to address loss of the hepatocyte functioning or cirrhosis of the liver. There are a number of techniques that can be used to differentiate hypoimmunogenic pluripotent cells into hepatocytes; see for example Pettinato et al., doi:10.1038/spre32888, Snykers et al., Methods Mol Biol 698:305-314 (2011), Si-Tayeb et al, Hepatology 51:297-305 (2010) and Asgari et al., Stem Cell Rev (:493-504 (2013), all of which are hereby expressly incorporated by reference in their entirety and specifically for the methodologies and reagents for differentiation. Differentiation is assayed as is known in the art, generally by evaluating the presence of hepatocyte associated and/or specific markers, including, but not limited to, albumin, alpha fetoprotein, and fibrinogen. Differentiation can also be measured functionally, such as the metabolization of ammonia, LDL storage and uptake, ICG uptake and release and glycogen storage.

[0427] In some embodiments, the hypoimmunogenic pluripotent cells are differentiated into beta-like cells or islet organoids for transplantation to address type I diabetes mellitus (T1DM). Cell systems are a promising way to address T1DM, see, e.g., Ellis et al., doi/10.1038/nrgastro.2017.93, incorporated herein by reference. Additionally, Pagliuca et al. reports on the successful differentiation of β-cells from human iPSCs (see doi/10.106/j.cell.2014.09.040, hereby incorporated by reference in its entirety and in particular for the methods and reagents outlined there for the large-scale production of functional human β cells from human pluripotent stem cells). Furthermore, Vegas et al. shows the production of human β cells from human pluripotent stem cells followed by encapsulation to avoid immune rejection by the host; (doi:10.1038/nm.4030, hereby incorporated by reference in its entirety and in particular for the methods and reagents outlined there for the large-scale production of functional human (3 cells from human pluripotent stem cells).

[0428] Differentiation is assayed as is known in the art, generally by evaluating the presence of β cell associated or specific markers, including but not limited to, insulin. Differentiation can also be measured functionally, such as measuring glucose metabolism, see generally Muraro et al, doi:10.1016/j.cells.2016.09.002, hereby incorporated by reference in its entirety, and specifically for the biomarkers outlined there.

[0429] In some embodiments, the hypoimmunogenic pluripotent cells are differentiated into retinal pigment epithelium (RPE) to address sight-threatening diseases of the eye. Human pluripotent stem cells have been differentiated into RPE cells using the techniques outlined in Kamao et al., Stem Cell Reports 2014:2:205-18, hereby incorporated by reference in its entirety and in particular for the methods and reagents outlined there for the differentiation techniques and reagents; see also Mandai et al., doi:10.1056/NEJMoa1608368, also incorporated in its entirety for techniques for generating sheets of RPE cells and transplantation into patients.

[0430] Differentiation can be assayed as is known in the art, generally by evaluating the presence of RPE associated and/or specific markers or by measuring functionally. See for example Kamao et al., doi:10.1016/j.stemcr.2013.12.007, hereby incorporated by reference in its entirety and specifically for the markers outlined in the first paragraph of the results section.

[0431] In some embodiments, the hypoimmunogenic pluripotent cells are differentiated into cardiomyocytes to address cardiovascular diseases. Techniques are known in the art for the differentiation of hypoimmunogenic induced pluripotent stem cells to cardiomyoctes and discussed in the Examples. Differentiation can be assayed as is known in the art, generally by evaluating the presence of cardiomyocyte associated or specific markers or by measuring functionally; see for example Loh et al., doi:10.1016/j.cell.2016.06.001, hereby incorporated by reference in its entirety and specifically for the methods of differentiating stem cells including cardiomyocytes.

[0432] In some embodiments, the hypoimmunogenic pluripotent cells are differentiated into endothelial colony forming cells (ECFCs) to form new blood vessels to address peripheral arterial disease. Techniques to differentiate endothelial cells are known. See, e.g., Prasain et al., doi:10.1038/nbt.3048, incorporated by reference in its entirety and specifically for the methods and reagents for the generation of endothelial cells from human pluripotent stem cells, and also for transplantation techniques. Differentiation can be assayed as is known in the art, generally by evaluating the presence of endothelial cell associated or specific markers or by measuring functionally.

[0433] In some embodiments, the hypoimmunogenic pluripotent cells are differentiated into thyroid progenitor cells and thyroid follicular organoids that can secrete thyroid hormones to address autoimmune thyroiditis. Techniques to differentiate thyroid cells are known the art. See, e.g. Kurmann et al., doi:10.106/j.stem.2015.09.004, hereby expressly incorporated by reference in its entirety and specifically for the methods and reagents for the generation of thyroid cells from human pluripotent stem cells, and also for transplantation techniques. Differentiation can be assayed as is known in the art, generally by evaluating the presence of thyroid cell associated or specific markers or by measuring functionally.

[0434] Additional descriptions of methods for differentiating hypoimmunogenic pluripotent cells can be found, for example, in Deuse et al., Nature Biotechnology, 2019, 37, 252-258 and Han et al., Proc Natl Acad Sci USA, 2019, 116(21), 10441-10446.

[0435] I. Methods of Treatment

[0436] As will be appreciated by those in the art, the differentiated hypoimmunogenic pluripotent cell derivatives can be transplanted using techniques known in the art that depends on both the cell type and the ultimate use of these cells. In general, the cells of the invention can be transplanted either intravenously or by injection at particular locations in the patient. When transplanted at particular locations, the cells may be suspended in a gel matrix to prevent dispersion while they take hold.

[0437] In some embodiments, the cells or pharmaceutical composition thereof is administered to the subject systemically (e.g., orally, parenterally, subcutaneously, intravenously, intramuscularly, intraperitoneally) or locally. In some embodiments, the cells or pharmaceutical composition thereof is administered to the subject such that the cells reaches a target tissue selected from liver, lungs, heart, spleen, pancreas, gastrointestinal tract, kidney, testes, ovaries, brain, reproductive organs, central nervous system, peripheral nervous system, skeletal muscle, endothelium, inner ear, or eye. In some embodiments (e.g., wherein the subject has an autoimmune disease), the cells or pharmaceutical composition thereof is co-administered with an immunosuppressive agent, e.g., a glucocorticoid, cytostatic, antibody, or immunophilin modulator. In some embodiments (e.g., wherein the subject has a cancer or an infectious disease), the cells or pharmaceutical composition thereof is co-administered with an immunostimulatory agent, e.g., an adjuvant, interleukin, cytokine, or chemokine.

[0438] In some embodiments, the cells or pharmaceutical composition thereof is delivered ex-vivo to a tissue or organ, e.g., a human tissue or organ. In some embodiments, the composition is delivered to an ex vivo tissue that is in an injured state (e.g., from trauma, disease, hypoxia, ischemia or other damage).

[0439] In other embodiments, the cells or pharmaceutical composition thereof is used in vivo, i.e., to a human or mammal. In addition to humans, compositions described herein may also be used to similarly modulate the cell or tissue function or physiology of a variety of other organisms including but not limited to: farm or working animals (e.g., horses, cows, sheep, pigs, chickens etc.) and pet or zoo animals (e.g., cats, dogs, lizards, birds, lions, tigers, bears, etc.).

[0440] In some embodiments, the universal type O negative cells described herein are administered to a recipient subject determined to be ABO blood group type A, B, AB or O. In some embodiments, the universal type O negative cells are administered to a recipient subject determined to be Rh factor positive or Rh factor negative. In some embodiments, the universal type O negative cells are administered to a recipient subject determined to be ABO blood group type A, B, AB or O and Rh factor positive. In certain embodiments, the universal type O negative cells are administered to a recipient subject determined to be ABO blood group type A, B, AB or O and Rh factor negative. In some embodiments, the Bombay phenotype cells described herein are administered to a recipient subject determined to be ABO blood group type A, B, AB or O. In some embodiments, the Bombay phenotype cells are administered to a recipient subject determined to have the Bombay phenotype.

[0441] In some embodiments, the cells are not targeted by the subject's immune system.

[0442] In some embodiments, the cells described are administered alone or formulated as a pharmaceutical composition. The administration of a pharmaceutical composition may be by way of transdermal or parenteral (including intravenous, intratumoral, intraperitoneal, intramuscular, intracavity, and subcutaneous) administration. In certain instances, the administration further comprises a bolus or by continuous perfusion.

[0443] In some embodiments, the cells or composition thereof co-administered with an additional agent, e.g., a therapeutic agent, to a recipient subject. In some embodiments, the co-administered therapeutic agent is an immunosuppressive agent, e.g., a glucocorticoid (e.g., dexamethasone), cytostatic (e.g., methotrexate), antibody (e.g., muromonab-CD3), or immunophilin modulator (e.g., ciclosporin or rapamycin). In some embodiments, the immunosuppressive agent decreases immune mediated clearance of cells. In some embodiments, the cells or composition thereof is co-administered with an immunostimulatory agent, e.g., an adjuvant, an interleukin, a cytokine, or a chemokine.

[0444] In some embodiments, a therapeutically effective amount of the cells or a composition thereof is administered to treat a disease. In some embodiments, a cell composition is administered with a pharmaceutically acceptable carrier. In some embodiments, the cells are any one of the cells described herein including differentiated cells derived from a stem cell.

### IV. EXAMPLES

### Example 1: Engineering of Universal Histo-Blood Type Cells

[0445] A. Cell Culture

[0446] The Gibco Human Episomal iPSC line (ThermoFisher Scientific, A1895) is obtained and cultured in StemFlex Medium (ThermoFisher Scientific, A3349401) and grown on 0.5 μg/cm² Vitronectin Recombinant Human Protein (ThermoFisher Scientific, A31804) coated plates or flasks. Cells are passaged when they reach ˜90-95% confluency. To passage, the cells are first washed 2× with DPBS −/− (Life Technologies, 14190250). Accutase (ThermoFisher Scientific A1110501) is added and cells are incubated at 37° C. for 5 minutes, or until cells detach by gently rocking the plate or flask. Cells are rigorously resuspended to facilitate single cell suspension, and then washed with DMEM/F12 (ThermoFisher Scientific, 11330057) before spinning down for 3 minutes at 250 g. The supernatant is removed, and the cell pellet is resuspended in StemFlex Medium+10 μM Y-27632 (Fisher Scientific, 12-545-0). Cells are then counted and seeded at the appropriate density on a new Vitronectin coated plates or flasks in StemFlex Medium+10 uM Y-27632. Media is replaced the next day with StemFlex media minus Y-27632, and exchanged every two days until cells reach 90-95% confluency.

[0447] B. Guide RNA and HDR Template Design

[0448] Synthetic guide RNAs (sgRNAs) for ABO, RHD, FUT1 are designed using the Benchling CRISPR Guide RNA Design tool with genomic sequences from ENSEMBL: ABO (ENSG00000175164), RHD (ENSG00000187010), and FUT1 (ENSG00000174951). For ABO, three gRNA sequences targeting exon6/7 are utilized in combination with homology directed repair (HDR) templates encoding c.258delG and 100 bases of homologous sequence upstream and downstream. Guide RNA directed to exon 6-7 gRNA1 target (5′-GCCAGCCAAGGGGTACCACG-3′; SEQ ID NO:24) is paired with single-stranded repair template 1 (5′-TGGGGGCGGCCGTGTGCCAGAGGCGCATGTGGGTGGCACCCTGCCAGCTCCATGTG ACCGCACGCCTCTCTCCATGTGCAGTAGGAAGGATGTTCTCGTGTACCCCTTGGCTG GCTCCCATTGTCTGGGAGGGCACATTCAACATCGACATCCTCAACGAGCAGTTCAG GCTCCAGAACACCACCATTGGGTTAACTGTG-3′; SEQ ID NO:25). Guide RNA directed to exon 6-7 gRNA2 target (5′-GATGTCCTCGTGGTACCCCT-3′; SEQ ID NO:26) is paired with single-stranded repair template 2 (5′-TGGGGGCGGCCGTGTGCCAGAGGCGCATGTGGGTGGCACCCTGCCAGCTCCATGTG ACCGCACGCCTCTCTCCATGTGCAGTAGGAAGGATGTCCTCGTAAACCCCTTGGCTG GCTCCCATTGTCTGGGAGGGCACATTCAACATCGACATCCTCAACGAGCAGTTCAG GCTCCAGAACACCACCATTGGGTTAACTGTG-3′; SEQ ID NO:27). Guide RNA directed to exon 6-7 gRNA3 target (5′-AATGTGCCCTCCCAGACAAT-3′; SEQ ID NO:28) is paired with single-stranded repair template 3 (5′-TGGGGGCGGCCGTGTGCCAGAGGCGCATGTGGGTGGCACCCTGCCAGCTCCATGTG ACCGCACGCCTCTCTCCATGTGCAGTAGGAAGGATGTCCTCGTGTACCCCTTGGCTG GCTCCCATTGTTTGGGAGGGCACTTTCAACATCGACATCCTCAACGAGCAGTTCAGG CTCCAGAACACCACCATTGGGTTAACTGTG-3′; SEQ ID NO:29). Alternatively, Guide RNA directed to exon 1 gRNA target (5′-GGCCAGCGTCCGCAACACCT-3′; SEQ ID NO:30) or guide RNA directed to exon 2 gRNA target (5′-GGATCATAGGTCGAAGTGCG-3′; SEQ ID NO:31) are used to introduce double-stranded breaks (DSBs) into the early codon exons 1 and 2. For RHD, two gRNA sequences targeting exon 2 target sequence (5′-CACCGACAAAGCACTCATGG-3′; SEQ ID NO:32) and exon 3 target sequence (5′-TGGCCAAGATCTGACCGTGA-3′; SEQ ID NO:33) are used to introduce DSBs into the early codon exons 1 and 2. Alternatively, a gRNA targeting the 5′ UTR target sequence (5′-TGGTTGTGCTGGCCTCTCTA-3′; SEQ ID NO:34) in combination with a gRNA targeting exon 8 (5′-GGAGGCGCTGCGGTTCCTAC-3′; SEQ ID NO:35) are used to remove the entire coding sequence of the gene from the genome. For FUT1, two gRNA sequences targeting exon 4 (the only coding exon) include guide RNA directed to exon 4 gRNA1 target (5′GGTCTGGACACAGGATCGAC-3′; SEQ ID NO:36) and guide RNA directed to exon 4 gRNA2 target (5′-GATTACCAAACCGGCCATTG-3′; SEQ ID NO:37) and are used to induce DSBs into the coding sequence of the gene.

[0449] C. Cell Engineering

[0450] gRNAs targeting either ABO or FUT1 are complexed with recombinant SpyFi Cas9 protein procured from Aldevron for 15′ at room temperature in nuclease free water. Cells are harvested in STEMFLEX and vitronectin using ACCUTASE cell detachment solution, pelleted and resuspended in Lonza NUCLEOFECTOR buffer P3+RNP complex and transferred to a Lonza NUCLEOCUVETTE vessel. Cells are electroporated with the Lonza 4D-NUCLEOFECTOR core unit using the CA-137 program and supplemented with STEMFLEX medium with CLONER supplement. Cells are transferred to 2 vitronectin coated wells in a 24-well plate containing STEMFLEX medium with CLONER supplement. Cells are expanded and then electroporated again with an RNP complex containing a gRNA targeting the RHD gene. Cells are stained with antibodies against the A antigen and Rh antigen and the negative population of cells are sorted into single wells of a 96-well plate by FACS. Individual clones are then stained again to verify that the cells are O type Rh negative or Bombay type Rh negative, and this is confirmed by genomic analysis.

[0451] D. Genomics Assays to Characterize ABO, RHD and FUT1 Gene Editing

[0452] Amplicons containing the targeted regions of ABO, RHD, FUT1 are produced using primers specific to these sites and the sequences are sequenced using an Illumina NextSeq sequencing platform. The results are aligned to the human genome and analyzed for insertions and deletions (indels).

[0453] E. Phenotypic Assays to Characterize Knock-Out (KO) of ABO, RHD and FUT1 Genes

[0454] Single cell cloning of gene edited cells is performed using the Hana single cell dispenser (Namocell) into 96 well plates. Single cell deposition confirmation and clonal cell outgrowth is monitored using the CELIGO imaging cyometer (Nexcelcom). The single cells clones are passaged and expanded into the following three cohorts: 1. Cell maintenance and banking; 2. Genomic characterization by Next Generation Sequencing (NGS); and 3. Phenotypic characterization.

[0455] F. Phenotypic Characterization by Immunofluorescence

TABLE 6
Reagents for phenotypic characterization

| Description | Catalog Number | Supplier | Dilution |
|---|---|---|---|
| Anti-RhD antibody | ab222792 | Abcam | 1:50 |
| Anti-Blood Group AB antigen antibody | ab24223 | abcam | 1:400 |
| Blood Group Antigen H (O) Type 1 Monoclonal | 53-9810-82 | ThermoFisher | 1:50 |
| Antibody (17-206), Alexa Fluor 488, eBioscience ™ | | | |
| Anti-Blood Group H ab antigen antibody | ab24213 | abcam | 1:50 |
| FUT1 Polyclonal Antibody | PA5-13515 | ThermoFisher | 1:50 |
| Anti-Galactoside 2-alpha-L-fucosyltransferase 1 | ab198712 | Abcam | 1:50-1:200 |
| antibody (FUT1) | | | |
| Goat anti-mouse secondary ab AF488 | A-11029 | ThermoFisher | 1:500 |
| Goat anti-rabbit secondary ab AF647 | A-21244 | ThermoFisher | 1:500 |
| Hoechst 33342 | H3570 | ThermoFisher | 1:2000 |
| Normal Donkey Serum | 566460 | Sigma | 5% |
| 16% Formaldehyde (w/v), Methanol Free | 28908 | ThermoFisher | 1:4 |
| Phosphate Buffered Saline (PBS) | 10010023 | ThermoFisher | |

[0456] Cells are washed with PBS and fixed in 4% paraformaldehyde in PBS for 15 minutes. The cells are then washed and blocked in 5% donkey serum in PBS/TWEEN-20 for 15 minutes at room temperature. Cells are rinsed three times in PBS prior to the application of primary antibodies. Antibodies are diluted in blocking buffer (5% donkey serum/PBS) according to the specified dilution in Table 6 above overnight at 4 C. Cells are then rinsed three time in PBS and Alexa-488 and Alexa-647 conjugated antibodies are diluted to 1:500 in PBS and added to the cells for 30 minutes at room temperature. Antibodies conjugated to Alexa Fluor 488 are incubated overnight and do not require a secondary antibody. Cells are washed three times and Hoechst is diluted in PBS and added to the cells. Cells are ready for imaging on the Cytation5 cell imaging reader. Wild type (WT) cells are maintained throughout the workflow and gene KO is confirmed relative to WT cell expression levels.

[0457] G. Functional Assays to Validate Knockout of ABO, RHD, and FUT1

[0458] Human serum from an O negative individuals is obtained from a vendor. Complement mediated cell killing assays are performed on the XCelligence® SP platform (ACEA BioSciences). 96-well E-plates (ACEA BioSciences) are coated with collagen (Sigma-Aldrich) and universal type O Rh negative or type Bombay Rh negative iPSCs are plated in 100 μl cell-specific media. After the Cell Index value reaches 0.7, human O negative serum is added. As a negative control, heat inactivated serum is used. Data are standardized and analyzed with the RTCA software (ACEA).

### Example 2: Differentiation of RUES2 Embryonic Stem Cells that are B Positive Cells

[0459] Human RUES2 embryonic stem cells (Lacoste et al., Cell Stem Cell 5 (3): 332-342 (2009); hPSCReg ID: RUESe002-A) were differentiated into cardiomyocyte-like cells. The resulting RUES2-derived cells survived when incubated with blood type B macaque serum but the cells were killed when incubated with human blood type O serum or pig blood type A serum as measured by a real-time cell analysis assay (XCelligence®; FIG. 18). This result indicates that RUES2 and differentiated cardiomyocytes derived therefrom are blood type B.

[0460] Additionally, undifferentiated RUES2 cells were characterized by PCR assays for blood type (see, e.g., Mohamed et al., Blood Res. 15 (4): 274-278 (20016)) and Rh status. Specifically, a pair of oligonucleotide primers that recognize a sequence in exon 4 and exon 5, respectively, of Rh D and Rh CcEe are synthesized and used on genomic DNA of Rh D phenotyped cells. After an initial cycle of denaturation at 99° C. for 5 minutes, 35 cycles were performed consisting of 1 minute at 95° C. of denaturation, 1.5 minutes at 55° C. of primer annealing, and 2.5 minutes at 72° C. of extension, followed by a final cycle of 9 minutes at 72° C. The Rh CcEe gene is distinguished from the Rh D gene, since in the Rh D gene there is a deletion in intron 4 between exon 4 and 5, resulting in a DNA fragment that is 600 bp smaller than that obtained from the CcEe gene. With primers A9 and A6, a PCR product of approximately 1200 bp was derived from the CcEe gene, whereas the smaller PCR product of approximately 600 bp, derived from the Rh D gene, was lacking when the donor was D negative. PCR products were size-separated on 2%-agarose gels and visualized by UV illumination after ethidium bromide staining. The results confirmed that the RUES2 cells were blood type B and Rh positive.

[0461] Exemplary Oligonucleotide Primer Sequences:

A6.
(SEQ ID NO: 21)
5′ TGACCCTGAGATGGCTGT 3′ (antisense)
A9.
(SEQ ID NO: 22)
5′ ACGATACCCAGTTTGTCT 3′ (sense)

[0462] Additional techniques for determining Rh status of the cells using PCR assays are described in, for example, Simsek et al., Blood, 1995, 85(10), 2975-2980 and Arce et al., Blood, 1993, 82(651). the disclosures including the figures, figure legends, and description of methods are incorporated herein by reference in their entirety.

### Example 3: Genome Modification of Human ABO Gene

[0463] Human episomal iPSC (Gibco) are blood type A-positive. The cells were edited to O-positive by creation of indels in the ABO gene. Guide RNA UCUCUCCAUGUGCAGUAGGA (SEQ ID NO:17) was complexed with S. pyogenes (sp) as9 to form a ribonucleoprotein (RNP). The RNP was then delivered to the cells via electroporation. The cells were then recovered for two days before evaluation of the edits. Edits of the ABO gene were assessed by PCR-amplification of the edited site and Sanger sequencing of the amplicons.

[0464] The edited pool was used to seed single cells for clonal expansion by single cell dilution. The resulting clones were verified using Sanger sequencing and two homozygous ABO KO clones were selected. The two selected clones were a +1 indel and a +2 indel. The resulting cells are functionally assayed to be blood type O-positive.

### Example 4: Genome Modification of Human iPSC from A+ to O+

[0465] Human episomal iPSC (Gibco) were edited from A positive (A+) to O positive (O+) by introduction of the ABO 258delG mutation in exon 6 by homology directed repair (HDR). Guide RNA CAGUAGGAAGGAUGUCCUCG (SEQ ID NO:18) was complexed with sp Cas9 to form a ribonucleoprotein (RNP). The RNP and donor template (below) were then delivered to the cells via electroporation. The cells were then recovered for two days before evaluation of the edits. Edits of the ABO gene were assessed by PCR-amplification of the edited site and Sanger sequencing of the amplicons.

[0466] Donor Template:

(SEQ ID NO: 19)
CTCCATGTGACCGCACGCCTCTCTCCATGTGCAGTAGGAAGGATGTCCT
CGTGTACCCCTTGGCTGGCTCCCATTGTCTGGGAGGGCACATTCAACAT
CGAC.

[0467] The edited pool was used to seed single cells for clonal expansion by single cell dilution. The resulting clones were verified using Sanger sequencing and two homozygous ABO 258delG mutation clones were selected. The resulting cells are functionally assayed to be blood type O-positive.

### Example 5: Genome Modification of Human FUT1 Gene

[0468] Human episomal iPSC (Gibco) were edited from A-positive to Bombay phenotype, Rh positive by creation of indels in the FUT1 gene. Guide RNA CUGGAUGUCGGAGGAGUACG (SEQ ID NO:23) was complexed with S. pyogenes (sp) Cas9 to form a ribonucleoprotein (RNP). The RNP was then delivered to the cells via electroporation. The cells were then recovered for two days before evaluation of the edits. Edits of the FUT1 gene were assessed by PCR-amplification of the edited site and Sanger sequencing of the amplicons.

[0469] The edited pool was used to seed single cells for clonal expansion by single cell dilution. The resulting clones were verified using Sanger sequencing and two homozygous FUT1 KO clones were selected. The resulting cells are functionally assayed to be Bombay phenotype, Rh positive.

[0470] All headings and section designations are used for clarity and reference purposes only and are not to be considered limiting in any way. For example, those of skill in the art will appreciate the usefulness of combining various aspects from different headings and sections as appropriate according to the spirit and scope of the invention described herein.

[0471] All references cited herein are hereby incorporated by reference herein in their entireties and for all purposes to the same extent as if each individual publication or patent or patent application was specifically and individually indicated to be incorporated by reference in its entirety for all purposes.

[0472] Many modifications and variations of this application can be made without departing from its spirit and scope, as will be apparent to those skilled in the art. The specific embodiments and examples described herein are offered by way of example only, and the application is to be limited only by the terms of the appended claims, along with the full scope of equivalents to which the claims are entitled.

1-174. (canceled)

175. An engineered cell in which expression of a blood group antigen gene is partially or fully inactivated and comprises one or more modifications, wherein the one or more modifications:
(a) inactivate or disrupt one or more alleles of:
(i) one or more major histocompatibility class I (MHC-I) molecules and/or one or more molecules that regulate expression of the one or more MHC-I molecules, and/or
(ii) one or more MHC class II (MHC-II) molecules and/or one or more molecules that regulate expression of the one or more MHC-II molecules, and/or
(b) increase expression of one or more tolerogenic factors,
wherein the increased expression of (b) is relative to an isolated cell that does not comprise the modifications.

176. The engineered cell of claim 175, wherein the blood group antigen gene is an ABO gene that is partially or fully inactivated by:
(a) insertion of an exon 6 258delG variation of the ABO gene,
(b) an insertion within exon 1, 2, 6, 7, or 8 of the ABO gene, or
(c) a deletion within exon 1, 2, 6, 7, or 8 of the ABO gene.

177. The engineered cell of claim 175, wherein the blood group antigen gene is a FUT1 gene that is partially or fully inactivated by an insertion or a deletion within exon 2 or exon 4.

178. The engineered cell of claim 175, wherein the blood group antigen gene is an RHD gene that is partially or fully inactivated by:
(a) an insertion or a deletion in a 5′ untranslated region (UTR) of the RHD gene, or
(b) an insertion of a deletion within exon 1, 2, 3, 4, 5, 6, 7, or 8 of the RHD gene.

179. The engineered cell of claim 175, wherein the cell is an Rh negative cell.

180. The engineered cell of claim 175, wherein the cell has a type O or Bombay phenotype.

181. The engineered cell of claim 175, wherein the cell is homozygous for the partial or full inactivation of the ABO gene.

182. The engineered cell of claim 175, wherein the cell is a human cell.

183. The engineered cell of claim 175, wherein the cell is selected from the group consisting of an induced pluripotent stem cell, an embryonic stem cell, an adult stem cell, and a differentiated cell.

184. The engineered cell of claim 176, wherein the ABO gene that is partially or fully inactivated is generated using a CRISPR/Cas gene editing system,
wherein the CRISPR/Cas gene editing system comprises a guide RNA targeting the ABO gene,
wherein the guide RNA targets a sequence selected from Table 1, Table A, Table B or Table C.

185. The engineered cell of claim 184, wherein the guide RNA targets a sequence comprising SEQ ID NO: 1 or SEQ ID NO: 2.

186. The engineered cell of claim 184, wherein the guide RNA targets a sequence comprising SEQ ID NO: 3, 4, 5, 15 or 16.

187. The engineered cell of claim 184, wherein the guide RNA comprises a nucleotide sequence of SEQ ID NO: 17 or SEQ ID NO: 18.

188. The engineered cell of claim 176, wherein the ABO gene is partially or fully inactivated by an insertion or deletion within ACACCT of exon 1; AGTGCG of exon 2; or CAAGCGC, GGCGCA, TGGGCG, ACCACG, GCCGCA, CCACGT, TGCCGT, TACTCG, ACTCGG, GAGCGC, GCCTGG, GTCCTT, TCACGC, TGGACG, TGGTCG, GCTGGC, CACGCG, AGGTGA, or GCATCG of exon 8 of the ABO gene.

189. The engineered cell of claim 176, wherein the exon 6 258delG variation of the ABO gene is generated using a CRISPR/Cas gene editing system,
wherein the CRISPR/Cas gene editing system comprises:
a guide RNA targeting the ABO gene that targets any one of SEQ ID NOs: 3, 4, 5, or 18, and
a homology directed repair (HDR) donor template comprising:
a sequence encoding the 258delG variation, a PAM sequence, a spacer region, and two homology arms,
wherein each homology arm comprises about 10 to about 1,000 nucleotides homologous to the ABO gene.

190. The engineered cell of claim 176, wherein the exon 6 258delG variation of the ABO gene is generated using a CRISPR/Cas gene editing system,
wherein the CRISPR/Cas gene editing system comprises:
a guide RNA targeting the ABO gene that targets any one of SEQ ID Nos: 3, 4, 5, or 18, and
an HDR donor template comprising a sequence of any one of SEQ ID NOs: 6, 7, 8, or 19.

191. The engineered cell of claim 176, wherein the insertion of an exon 6 258delG variation of the ABO gene is a homozygous variation such that the cell is a type O cell.

192. The engineered cell of claim 175, wherein the one or more molecules that regulate expression of the one or more MHC-I molecules regulate cell surface protein expression of the one or more MHC-I molecules.

193. The engineered cell of claim 175, wherein the one or more molecules that regulate expression of the one or more MHC-II molecules regulate cell surface protein expression of the one or more MHC-II molecules.

194. The engineered cell of claim 175, wherein the one or more modifications reduce expression of:
one or more MHC-I molecules;
one or more MHC-II molecules; or
one or more MHC-I molecules and one or more MHC-II molecules.

195. The engineered cell of claim 175, wherein the one or more modifications reduce expression of one or more molecules selected from the group consisting of B2M, TAP I, NLRC5, CIITA, HLA-A, HLA-B, HLA-C, HLA-DP, HLA-DQ, HLA-DR, HLA-DM, HLA-DO, RFX5, RFXANK, RFXAP, NFY-A, NFY-B, NFY-C, IRFI, and any combination thereof.

196. The engineered cell of claim 175, wherein the one or more modifications reduce cell surface protein expression of the one or more MHC-I molecules.

197. The engineered cell of claim 175, wherein the one or more modifications reduce cell surface trafficking of the one or more MHC-I molecules.

198. The engineered cell of claim 175, wherein the one or more modifications reduce expression of B2M.

199. The engineered cell of claim 175, wherein the one or more modifications reduce expression of HLA-A, HLA-B, and/or HLA-C.

200. The engineered cell of claim 175, wherein the one or more modifications reduce cell surface protein expression of the one or more MHC-II molecules.

201. The engineered cell of claim 175, wherein the one or more modifications reduce cell surface trafficking of the one or more MHC-II molecules.

202. The engineered cell of claim 175, wherein the one or more modifications reduce expression of CIITA.

203. The engineered cell of claim 175, wherein the one or more modifications reduce expression of HLA-DM, HLA-DO, HLA-DP, HLA-DQ, and/or HLA-DR.

204. The engineered cell of claim 175, wherein the one or more tolerogenic factors comprise one or more tolerogenic factors selected from the group consisting of PD-L1, HLA-E, HLA-G, CD47, CD200, FASLG, CLC21, MFGE8, SERPIN B9 and any combination thereof.

205. A pharmaceutical composition comprising the engineered cell of claim 175.

206. A method of treating a patient in need of a treatment comprising administering the engineered cell of claim 175 to the patient.

207. A method of generating an engineered cell comprising:
(a) obtaining an isolated cell;
(b) introducing into the cell a CRISPR/Cas nuclease and a guide RNA targeting a blood group antigen gene; and
(c) selecting an engineered cell in which the blood group antigen gene is partially or fully inactivated,
wherein the engineered cell comprises one or more modifications, wherein the one or more modifications:
(i) inactivate or disrupt one or more alleles of:
(1) one or more major histocompatibility class I (MHC-I) molecules and/or one or more molecules that regulate expression of the one or more MHC-I molecules, and/or
(2) one or more MHC class II (MHC-II) molecules and/or one or more molecules that regulate expression of the one or more MHC-II molecules, and/or
(ii) increase expression of one or more tolerogenic factors,
wherein the increased expression of (ii) is relative to an isolated cell that does not comprise the modifications.

The application's sequence listing, which the Patent Office published only in electronic form, follows.

SEQUENCE LISTING (13663 sequences)

SEQ ID NO: 1 - DNA, 20 bp, Homo sapiens
ggccagcgtccgcaacacct

SEQ ID NO: 2 - DNA, 20 bp, Homo sapiens
ggatcataggtcgaagtgcg

SEQ ID NO: 3 - DNA, 20 bp, Homo sapiens
gccagccaaggggtaccacg

SEQ ID NO: 4 - DNA, 20 bp, Homo sapiens
gatgtcctcgtggtacccct

SEQ ID NO: 5 - DNA, 20 bp, Homo sapiens
aatgtgccctcccagacaat

SEQ ID NO: 6 - DNA, 200 bp, Artificial Sequence
  source: /note="Description of Artificial Sequence: Synthetic polynucleotide"
tgggggcggccgtgtgccagaggcgcatgtgggtggcaccctgccagctccatgtgaccgcacgcctctctccatgtgcagtaggaaggatgttctcgtgtaccccttggctggctcccattgtctgggagggcacattcaacatcgacatcctcaacgagcagttcaggctccagaacaccaccattgggttaactgtg

SEQ ID NO: 7 - DNA, 200 bp, Artificial Sequence
  source: /note="Description of Artificial Sequence: Synthetic polynucleotide"
tgggggcggccgtgtgccagaggcgcatgtgggtggcaccctgccagctccatgtgaccgcacgcctctctccatgtgcagtaggaaggatgtcctcgtaaaccccttggctggctcccattgtctgggagggcacattcaacatcgacatcctcaacgagcagttcaggctccagaacaccaccattgggttaactgtg

SEQ ID NO: 8 - DNA, 200 bp, Artificial Sequence
  source: /note="Description of Artificial Sequence: Synthetic polynucleotide"
tgggggcggccgtgtgccagaggcgcatgtgggtggcaccctgccagctccatgtgaccgcacgcctctctccatgtgcagtaggaaggatgtcctcgtgtaccccttggctggctcccattgtttgggagggcactttcaacatcgacatcctcaacgagcagttcaggctccagaacaccaccattgggttaactgtg

SEQ ID NO: 9 - DNA, 20 bp, Homo sapiens
caccgacaaagcactcatgg

SEQ ID NO: 10 - DNA, 20 bp, Homo sapiens
tggccaagatctgaccgtga

SEQ ID NO: 11 - DNA, 20 bp, Homo sapiens
ggaggcgctgcggttcctac

SEQ ID NO: 12 - DNA, 20 bp, Homo sapiens
tggttgtgctggcctctcta

SEQ ID NO: 13 - DNA, 20 bp, Homo sapiens
ggtctggacacaggatcgac

SEQ ID NO: 14 - DNA, 20 bp, Homo sapiens
gattaccaaaccggccattg

SEQ ID NO: 15 - DNA, 20 bp, Homo sapiens
tctctccatgtgcagtagga

SEQ ID NO: 16 - DNA, 20 bp, Homo sapiens
cagtaggaaggatgtcctcg

SEQ ID NO: 17 - RNA, 20 nt, Artificial Sequence
  source: /note="Description of Artificial Sequence: Synthetic oligonucleotide"
ucucuccaugugcaguagga

SEQ ID NO: 18 - RNA, 20 nt, Artificial Sequence
  source: /note="Description of Artificial Sequence: Synthetic oligonucleotide"
caguaggaaggauguccucg

SEQ ID NO: 19 - DNA, 102 bp, Artificial Sequence
  source: /note="Description of Artificial Sequence: Synthetic polynucleotide"
ctccatgtgaccgcacgcctctctccatgtgcagtaggaaggatgtcctcgtgtaccccttggctggctcccattgtctgggagggcacattcaacatcgac

SEQ ID NO: 20 - DNA, 20 bp, Homo sapiens
ctggatgtcggaggagtacg

SEQ ID NO: 21 - DNA, 18 bp, Artificial Sequence
  source: /note="Description of Artificial Sequence: Synthetic primer"
tgaccctgagatggctgt

SEQ ID NO: 22 - DNA, 18 bp, Artificial Sequence
  source: /note="Description of Artificial Sequence: Synthetic primer"
acgatacccagtttgtct

SEQ ID NO: 23 - RNA, 20 nt, Artificial Sequence
  source: /note="Description of Artificial Sequence: Synthetic oligonucleotide"
cuggaugucggaggaguacg

SEQ ID NO: 24 - DNA, 20 bp, Homo sapiens
gccagccaaggggtaccacg

SEQ ID NO: 25 - DNA, 200 bp, Artificial Sequence; identical to SEQ ID NO: 6
  source: /note="Description of Artificial Sequence: Synthetic polynucleotide"

SEQ ID NO: 26 - DNA, 20 bp, Homo sapiens
gatgtcctcgtggtacccct

SEQ ID NO: 27 - DNA, 200 bp, Artificial Sequence; identical to SEQ ID NO: 7
  source: /note="Description of Artificial Sequence: Synthetic polynucleotide"

SEQ ID NO: 28 - DNA, 20 bp, Homo sapiens
aatgtgccctcccagacaat

SEQ ID NO: 29 - DNA, 200 bp, Artificial Sequence; identical to SEQ ID NO: 8
  source: /note="Description of Artificial Sequence: Synthetic polynucleotide"

SEQ ID NO: 30 - DNA, 20 bp, Homo sapiens
ggccagcgtccgcaacacct

SEQ ID NO: 31 - DNA, 20 bp, Homo sapiens
ggatcataggtcgaagtgcg

SEQ ID NO: 32 - DNA, 20 bp, Homo sapiens
caccgacaaagcactcatgg

SEQ ID NO: 33 - DNA, 20 bp, Homo sapiens
tggccaagatctgaccgtga

SEQ ID NO: 34 - DNA, 20 bp, Homo sapiens
tggttgtgctggcctctcta

SEQ ID NO: 35 - DNA, 20 bp, Homo sapiens
ggaggcgctgcggttcctac

SEQ ID NO: 36 - DNA, 20 bp, Homo sapiens
ggtctggacacaggatcgac

SEQ ID NO: 37 - DNA, 20 bp, Homo sapiens
gattaccaaaccggccattg

SEQ ID NO: 38 - protein, 9 aa, Unknown
  source: /note="Description of Unknown: 'LAGLIDADG' family peptide motif sequence"
LAGLIDADG

SEQ ID NO: 39 - DNA, 244 bp, Homo sapiens
aggcagaagctgagtggagtttccaggtgggggcggccgtgtgccagaggcgcatgtgggtggcaccctgccagctccatgtgaccgcacgcctctctccatgtgcagtaggaaggatgtcctcgtggtaccccttggctggctcccattgtctgggagggcacattcaacatcgacatcctcaacgagcagttcaggctccagaacaccaccattgggttaactgtgtttgccatcaagaagt

SEQ ID NO: 40 - protein, 6 aa, Homo sapiens
RKDVLV

SEQ ID NO: 41 - protein, 37 aa, Homo sapiens
TPWLAPIVWEGTFNIDILNEQFRLQNTTIGLTVFAIK

SEQ ID NO: 42 - DNA, 200 bp, Artificial Sequence; identical to SEQ ID NO: 6
  source: /note="Description of Artificial Sequence: Synthetic polynucleotide"

SEQ ID NO: 43 - protein, 5 aa, Artificial Sequence
  source: /note="Description of Artificial Sequence: Synthetic peptide"
RKDVL

SEQ ID NO: 44 - protein, 30 aa, Artificial Sequence
  source: /note="Description of Artificial Sequence: Synthetic polypeptide"
PLGWLPLSGRAHSTSTSSTSSSGSRTPPLG

SEQ ID NO: 45 - DNA, 200 bp, Artificial Sequence; identical to SEQ ID NO: 7
  source: /note="Description of Artificial Sequence: Synthetic polynucleotide"

SEQ ID NO: 46 - protein, 6 aa, Artificial Sequence
  source: /note="Description of Artificial Sequence: Synthetic peptide"
RKDVLV

SEQ ID NO: 47 - protein, 30 aa, Artificial Sequence; identical to SEQ ID NO: 44
  source: /note="Description of Artificial Sequence: Synthetic polypeptide"

SEQ ID NO: 48 - DNA, 200 bp, Artificial Sequence; identical to SEQ ID NO: 8
  source: /note="Description of Artificial Sequence: Synthetic polynucleotide"

SEQ ID NO: 49 - protein, 5 aa, Artificial Sequence
  source: /note="Description of Artificial Sequence: Synthetic peptide"
RKDVL

SEQ ID NO: 50 - protein, 30 aa, Artificial Sequence
  source: /note="Description of Artificial Sequence: Synthetic polypeptide"
PLGWLPLFGRALSTSTSSTSSSGSRTPPLG

SEQ ID NO: 51 - DNA, 24814 bp, Homo sapiens
ggaggccgagaccagacgcggagccatggccgaggtgttgcggacgctggccggtgagtgcaggcctcggccccgggtgcccgcgagggagccgctaccgcagggaatgcggggtgcacccgacagccgggccggggtgggggcgctcagggctgcgaggcttcgggccggccgccgccccagcctccgagaccctgcgtcctggggagccggcgggcaggtgggctcggccgcgctgtgggtgcctgggacccgcagggaggatgggcgcggtggcgcggcctggcggggggctcgtctccggggtccccgggtcctggtgagagcggggtccctcgacgccgtggcggtctccagcctctcctcgcccctccacgctccccgccttccatgagctgctattttcagcacctaccgcccgaccctggactaggacaaggctctgggctgccctgcccgccccccagcccttccctcgggcacggcggccaggcgcccgggttgaccgggaacagcctccataccccaaacgcggaggcgcctcgggaaggcgaggtgggcaagttcaatgccaagcgtgacgggggaactgtgccccgggccctcaggtgatataggagttaagaagaaattattgaggcaaccagatgcggtgactcaggcctgtaaccccagcactttgggaggccgagggtggatcacctgtccttaattttcttggcgccagaagatgaattgagtatttacccagacaacaacgtcgcttcagagggagggatgcagaacgcagggccacggggtgcaggctgcaggccagtgaaccccaacgccaaaggccagggagagccgggtggggtacccagagccagcacacagccctttaatttagaggagtgctgtgtacacatctggggagagatgttttactttgatttggaatcaggtggcggataaggcatactgaggcctgacttggtgagggctcctgccccggaggtgcagccctggaggagcgggaggcagaggagtggaaaattcatgaagaaaaccgggtatggtgtaggtcgaggccctgccctcagtaatgctcaccatttgtcagtgtttactgtgaggcagcactgtgttcagtatcgctgagttctcaggaaggaacggtaaatacttcccgggtcattctttcacccacgggaaaacaggtttggagagatctgggacagtgctctggtcctaggcaggaagggctgagtggggcctgggactcaggtctgactgcaaacacctgcctcctccctgtgctgccagcgccttccgggttcttccctgtccctcctttgtggtctttgttttcccttttttgtcttaatatgtttcaacggatgtatacaataaaccgcacatgaaaggtacagctggatacatcttgacccagtcaagatgatgaacacagctgccaccccaggagtctgtcctgccccacgggttatgctgtcttagttggtctcatgtcagggagccttggaggaccagggtcgggcagttggtctctatactcctggggttctggcactggctctggcccatgaccgcacccaagacaaacgtcttgaagactaagaggttaggtctttgagaaacctggcaaatgagtgcccattctcaggttacccacattctgcatgttgatttagtcatccaaccaatgttggttgaacactgatgagaacaagcaggcctgtgctagaaggtgcctgcagccaggagctggtgagctggtgtccttagggacaccaatggcgagggacccagtgtgtggaaatctgggggacaagcatgccagggagaagagctcacatggggaaggcccggctccacaaatcagtcaggcttgttggggcgggcaggagagcagggtagtggagtcagagggagtgatcccccgaaaggcaggaagaggacatgagagagccttggagatgacggtgaggatgtggttggtgggcggtgagctgggtgtcatgtgctggctccttagagaatgctcagctccttcacacccatcataatccctggaggactgagaccacgtgcaggagttttggaagctggcagtgcacccagtcccggctctcctccattctggtgggtctcaccagagattggccaagaagagatcaaactgttcctggaccaaactgagggtggggctgctatctctcgcggcccaataacgagatgcagatgaactggggagaaagagagtttttatttctgtaaccagttacaaggagaagacctggaaattatctccagaccaactcaaaattacaaagttttccagagcttatataccttctaagctatatgtctatgtgtaagtgtgcattcatctcaagacataagtaattgacttatgttaatctataactaaggtctgagtcctgaagaccttcctctggatcctcagtaaatttacttaatctaaaacccttatcttgtctcctaaatcatgggggtttgggaagttccttcagacccccagtaaacttatttgtggagtcctggggaatttcttcagatccccaataaaacttgtttaatcctaaatgggtcctgttaagaattccttcgttattttgtcatgcttgaaggcccaggaaaggtctaggcaaaactcttggtgggattttgttatattccagcctttttataagggcactggcttttaatatttaatttaaccactcagtcagtactgaaacagttgttagggaggcctgcgttagtgagacctgacctgccacaacacatcttactcggaatgctgcccataacttcaaaaaatcagctttgacggagccctactgaacacacctagcatctctcttccttcagcttagggtcaaggggctggggttgatggcaccattgaaagaaacagctttattgccgtgtcattgatatgccataaaattcacctgtttcaaatgaattattttcagttagtttacagagttgtgaaataaattttataacttttccatccccagcccaccaaaactccctggaactcctccgcagtcattccccattcccacctggcctcagacaatcactttctgtctctccagtcttgccttttctggacagttcctatgaatggagtcctgtgttacatggtcttttgcatctgacttccttcacttagaataatgattccgagattcatgtatgttgtagtatgtatcagtatttaattcctttttattactgaataatccattgtacagatagaccacattttgtttatccattcatcagctgaaggacatttcggctgtttctgcttttttagctattttaaactgcacgcagcactgctatgaacatttgtgtacaagactttgtgtgaacatgttttcatttctcttgggttgatacccagcagaggaattgctgggtcatacagaaagtctgatttaacattttaagaaactagcaaactgttttccaaagtgactgccccattttacattcccatcagcagtgtataacggttctaattttcttttcctttttcttttcttgagacaaggttttgctctgtcacccaggctggagtgcagtggcatgatcttggctcactgcagcctcaatctcttgggctcaattggtcctcccacctcagcctcctgagtagctgggactacaggtgagtaccaccacatccagctaatttttgtatttttggtagagatggggttttgccatgttgcccaggctgttctcaaactcctgggctcaagtgatctgcccacctcggcctccccaagtcctgggattataggtgtgagccgctgcgcctggctgagggttccactgtctgtacgtctgcagcaatacataccattcttgtgggtaaaaggtggtatctcattatagttttgatttgcatttccccaaggtcaaatgatggcaagtggcttttcttgtgctttttagccatttgtatatgtttttggtgaaatgcctattgaaatgttttgcctttttaaaaattgagttgtctcctttgttcagttttgagagttctttacatacacagtatcatatatatatatatatatatatatatatatatatatatatacacaccagatatatgatttgcaaatattttcaaccatcaatagtttaacacttttttattggtattttgaagtagaaaagttttacattttgatccattccaatttattaactttttcttttattgtgtatctggtatcatatctaagaaatcttaatccagtgtcacaaagatttaatcttatattttcttctaaccgctttctagtttatgtgtaagaatctgtccattttacctaagttgcataatttgttggcaaacagttgtacatagtatttccttgaaatccttttaatctctgtaagattggaattgctgtctcctcttttagtcctgattttagttatttgtgttctctctctctctggtcaatgtagctaaagctttgtcaattctcttgatcttttcagagaactgccatttgatatttttttactttatctttttctttctgttctctagttcattggtttccactcttctcactttgggtttaattcgttctgtcttttcttattgtagttacttacaatggaagcttacacacttgatttaagatttttttttctaatgtagacatttacagctataaatttcccttgaaacacagctttagttatatctcataaattttggtatgttgtgtttacattttcattcagctcagtgtatcttttgattttcttctttgacccattgcttatttagaattatgttgtttaatttctatgtatttataggtttcccaaatttcttttgttaatttctgatttcattcccctgtggctagagaagaaactctgtggatatcagtcctttcgaatttctcagaattgttttatggtccagcatatgattgaccttggacactgttccatgtgcacttgaggagaacgtgacttcggctcttgccaggtggagtgttctagagatgtcagttggtgtccagtgatgtcaagtcatttgtatctactgattttctttctaattattctatccattactgagagtggggtaggattttggtgtccaattattgtttttttgtttttttttttttgtttgtttttttttttttttgaggtggagtctcactttgtcacccaggctggagtgcagtggtatgatcacagctcactgcagcccccacctcccaaggcttaggtcacctcagcctcctgagtagctgcaactacaggcaagtaccatcatgcctagctgatttttgcattttttatagacagggttttgccatgttacttaggctggtcacgaactcctgggctcaagtgacccacccacctcggcctcccaaagtgctgggattacaagcgtgagtcaccatgcctggcccaaccattactggtgaattgactgtttcacccttcaattctgtgagtttttgcttcatgtattgctgcgggataattaaggaatcagagagaccgatggggttgaggaggaattatttaattatttaggtgcaccgacccaatcagattaacatccaaaggactgggccccaaacaaagagtcaagctaccttttaagcattttgtggggtggggggagatttgtgcagggggaagagtattacagaagcaagaaacaaagacagttattcagttaagacatgcattacattatttcttacttttcaaggaacaacacgttttatgactcaagattatctgtttagtgaccttgcagctgcacagctagagaaacagagtcttcgcaatgcctgggaaagggagagataaggctcactagccacagaaaaacagccagttaatttttaaaggactccagccctttctcttcctcaaggggaattggttttttacatacaactgagtttttgcttacacagtttttaatttcttttaattcctgttctagtattttggggctaggttgtcaggtatgtatatatttctgtttgttatattttcgtgatgtattcactttatatcatggcagaatgtttctctttagtaagatttttgatcttaaaaaagttggccagatggggtggctcatgcctgtgatcccagcactttgggaggccaaggcaggtggatcacctgaggtcaggagttcaagactagcctggcgaacatggtgaaaccccgtctctactgaaaatacaaaaaaattagccagctgtgatggtgtgcgcctgtaatccctgctacttgggaggctgaggcacgagaattgcttgaacccgggaggctgaggttacagtcagccaagatcgtgccactgcactccaacctgggtgatagagtgagactctgtctcaaaaaaacaaaaaaattatttagtctgacgttagcatttctcctcaagctcccttacggttgtttgcatagcaaatctactatccttttgctttgacctatttgtatctttgtttctaaagtatgtatgtctctcacaggcagcatatagtcaaagcttaaaaaaaaaatccagtctaacgatctctgccttttgattggcatgttcattctattcccattcaatgttattattgctgtggttggatttccatctatcagttcacaatttgttttctatgttttatgcctttttgttcttctgttcatcttttactaccttcttttgtattaagtattttctagtgtagcatttaaattccctttttctttttaagtgtatattttaaagttattttgttagtgtttgctccagggattacaatatgcattttaatttatcaggatctacttcagattaatactaattttagtaaaatacaggaacttgactccagtataactccatttcctccctccttgcttgtggtttgtagtattattgtcgtatatgttcatctatatatgttataaactcaacaacatggtgttataattattgtttcacacaatcttatttcttttcaattcagtaagacaagtaaggagaaaaacacttttcaagtcttttatattacactgtatatttatcactgactttactcttgatttcttcctgtatattcaagctattgtctggtgacctttccttgctccagtatatataataacttcattgcctccttgctcctttatgctattattgtcatatatattatatatgtttatgctgtgagcccatcagctaagtcagcttagcaaggtctcaagatacaaagtcaatgaataaatcaggctgggtgtggtggctcacacctgcaatcccagcactttgggaggccaagataggtagatcacttgaggccaggagtttgagagcagcctggcccacatggcaagactccatctttacaaaaatacaaaaaaaaaaaaaaagttgagtgtggtggtgcgcctgtaatcccacctacttgggaggctgaggcatgagaattgcttgaacccaggagggagaggttgcagtgactggagatcacaccactgcactccagactgggcaacagggcaagacacagtctaaaaaaaaaaaaaaaagaaaaaagaaaaacaagaataaatcaattatttttctataatacttgccacaatcaattgaaccatgaaaaattttaaataccatttacagtagcatcataaaacatgaaatatttagagaataatttaccaaattaggagaaatgtctatacaattaaaactgcaatataaaccaggcaccatggctcatgcctgtaatcccagcactttgggaggtcaaggtggccagatcacttgagcccagaagtttgagaccagcctgggtgacatagtgagaccctgtctctacaaaaaaaaaaaaaaattagctgggcatggtggcatgcacctgtagcccctgctactcaggaggctgaggtgagaggatgacttgagcccagtaggcagagattgcagtgcattccagcctgggctacacagcaagaccctgacaaaaaaaaaaaaaaaaagaaaaagaaggtcacaaaaaaacagaaaactgcaaaatattgatgacaaaaattaaagaagacataaataaatggagaaatataccatgctcatggattggaagacttacattgctaaactgtcacttctccccagatggatctacagagtccacataatctcacttaaaactccagaagaaatttttgtaaagttgacagctgattctaaaattttacatagtaatcagaataggttgatattaggatagacagatagttcaatggaatagaatgcagagtttagaaatagacctacacagaaatagtccattgattttttaagagttgctttttgataagggtgctaaggtaatgtgatagagaaaggaaagtattttcaattcaaatggctgaaatgactggatatccattgagggaagaaagggactttagcctttcacacaatacacaaaaattatggaattctgaagaaaataagagaaaatgttcatgaacttggggtaggcaaaaatttaatagatgaggcaaaaaaaaaaaaaggcccaaaccataaaaatggtttcatttttataaggataaattagagtttataaaaattaacacttcccttcaaaagaaaaattaaggaaaaatgaataaataagccaccgactgaaagaaaatatttgttttctaagaagtattttgtttttcattttatgggttcatagtaggtgtatatatttatggggtccctgagatattgtggttcagtcatacaatggaaaattcacatcatggagaactggtatccatcctcttgagcaattatcctttgtgttacaaacaatccaactatactcttttagttatttttattctttttttttttttttttgagatggagtctcgctctgtcacccaggctggagtgtggtggcgccatctcaactcactgcaacctccgcctcccaggtttaagtgattctcctgcctcagtttcctgagtagctgggactacaggcacccaccaccacgcccggctagtttttgtatttttaaactttttttttcttttttctttttcttctttttttttttttgagatggagtctcgctctgtcgcccgggctggagtgcagtggtgcaatctcggctcactgcaacctccgtctcccaggttcaggagattctcctgcctcagcctcccaagtagctgggattacaggcatgcgccaccacacccagctaattttttgtatttttagtagaggcaggatttcaccgtgttggtcaggctagactcgaatgcctgacctcgtgatccacccacctcggcctcccaaagtgctggggttacgggcgtgagccaccacgcctggccttagtttttgtatttttagtagagatgaggtttcaccatgttggccaggctggtcttgaactcctgatctcaggtgatccacctgcctcggcctcccaaagtgctgagattacaggcatgagccactgtgcccgacctctcttttagttatttttaaatgtgcaattaaattattattgactatagtctccctgttatgctatcaaatactgggtcttattcattctttctatttatttgtacacattaaccatccctacataccctctcacccctgccactacccttccaagtctctgcgaaccatccttctattctctatctccatgagtttaattgtttcgatgttttgatactacagataagtgagaacatgcagtgtctgtctctctgtgcctggcgagaaaatatttgtaatatttgtatttggcaaaggacttgtatccaaaatatagaaataaattctgctcaataataaaaagagaaacaacttaatgagacccagtgtctacaaaaagtagaataattagccgggcatgttggtgcatgtctgtagtcccacctaatcaggaggctgagggggaaagatcacttaagctcaggagttcgaggttgcagcgagctgtgatcgtgccactgcactccagcctgggtgacagagtaagatcctgtctaaaaaaaataaaaatagagggccaggtgaggtggcttatgcctgtaatcccagcacattgggaggctgaggcaggtggattgcttaagcccaggagttcaagaccagcctgggcaacatggtgaaaccccatctctaccaaaaccacaaaaaatcagctagatgtggtgcatgcctatagtctcagctactcaaaaggctgaggtgggaggatcacctgagcccaggaagtcgaggctgtagtgagccatgatcatgccaccacactccagcctgggcaactggagtgggactgtgccccccaaaaatatatataagtaaataaataaataaataaataataaaatgagctaaagatctggacaggcttcataagaagcaagcaaatggccaataaatacatgaaaagatgatttacctccttagtcattggacacacttagataccactcctcatccactagcatggctaaaggataaaagagtgaccatcaagtgttggcaaggactgtggttctcgtacattcctggcgggaatggaaaattcagtcaccactttggaacacagtttcttacaaagttaaacatacacttaccatatgacccatcttttccattccttggtatttactcaagggaaatgaaaacacaggtccacaaatacctgcacatgagtgtttacagaagctttgttgctagtggccccgaacagtgaaaaaaccacagtgtctgtcaataggagacagaataaatgaattgtggcggattaacaatggcgtgcttctcagaaatgaaaaagaacgaacgattgatacacgtgacaatataggtgaatcttcaaaacagcatgcggtgtgatgcggccagacataaaagagcatgtatcagaggattccgtgtatgggaaacgccagggaatcagatccatggttgtcagggtcaggagggaccttactggggtgattacatgtgtacatacattgtgtgaaactcatcaaaaccgtatacctaaagtgggcacattttattggatgtaagttatccctcaaattaaattaattttcaaagttttaaaaaatggaaccatttttgccacattgaaggaaaattatttccaccaagatttccctacagccaaacgatctaccaactacaaaaatggaaaaaataatttaggacatgtaaagttcaaatgttttgcctcccacgtttctgtttcaagaagctattcgagataaatcgctccgtggtcacaggacttagaaaggtggaggtaaacacacacaagcattataagataagaagtaacagatgaattagttgaaagggactgatttcgggggaaggaataggaactgggccaggagatagacgcctttcaggcttgcccttgtgaaaacgatagtcccctcttacctgcgggggataggttccgagatccccagtggatgtctgaaaccacagatagtaccaaaccctacagagagtatgttttctcctgtacacacatacctatgatagggtttaatttataaattaggcaccgggtgggattaacaaccataattaatagtaaaatagaacaattataacaatatactgtccgaggcgggtggatcacttgaagtcaggagatcgagaccagcctggccaacatggtgaaacctgtctctactaaaaatacaaaaaattagccaggcgtagtggtgggcgcctgtaaacccagctactcgggaggctgaggcaggagaattgcttgaacccgggaggcggaggctgtagtgagccgaaggtgcccctttgcactccagcctgggcaacgagcaaaactccatctcaaaaacaacaacaaaacaacaacaacaacaaaaacaatatactgtaataaaggttacgtgaatgtggtctctctaaaaaaaaatgtgtatatatcttagtttgtgggttttttgttgttgtagttttgtttattattaagagacagggtcttgctctgttacccaggctggagtgcagtggtgtgatcatggcttactgcagccttcacctcctaggctcaagtgatccttccacctcagcctcctgggaccagaggcatgcaccactatgcccagctaattgttttttttttttttttcttgatagaaatgagttctcactatgttgcccaggctggtctagaactcctggcttccagcaattctgctggctcagcctcccaaagtcctgggattataggcacgagccacgatgcctgtcctcaaaatattttactgtactgtactcacctattattggcctttggttgaccatgggtaactgaaactccagcaagcgaaggtgtggataagggaactactgtacgtgactttaatatacataaaatcaccttaaagacaatgattgtttccagaacatgagcctctgagacagcagggagatactaggggaagttggtggctcctctccctggcaggaactggtctgggctcctggctcagcctggccatgaggctgtcctggcctccctcggtgggttcgacagtgacctcgacgtgctcatttcagtgtggttcattccggtctcccaggggaagggggtgctgagtggaaggaggtcaatgggaagccggggtggctctcagagtctgcaggagcagtcgggctgatgagctgggaggagcagaccgcctccctcttctctgagtgggaggagggccagatctggactgggtttggagatgctcaggtggggctcagagcatcacctgtggggcagagggaccatcttggcagatgaaggcccgtcgcagggtgtgatgcctgaattacaaggcgggacaggtaaagtggggcaggtgagagaaggagggtgagtgatgtgatttttctactcctgttttccaggaaaaccaaaatgccacgcacttcgacctatgatccttttcctaataatgcttgtcttggtcttgtttgggtaagacacatttgaccatcgaggctggcctggtttggggagaagtgaccacagcagccaatcagacccatggggcctccctgagctccccaagtatcacagttatcagggtcctaaggacagttattgcctgcgtccagctctggcggagggtgtgcttacttgctcccttattttagcctcacctgggcaacaggctcatctcactcccatttaaaattttcctaagtgtggagtctggggctgggagagcaagccccttgcccacaattgcgtggctgggggtggggaaggcaattctgggtcccaagctgttagtcgcttccagacacagaaggtcccagaaccaagagtgaagtcacctgtcacctctactggggcatctctggacacggtctggaaacactccctgacgtggcctcagggactgcactgaccaaggcactggtggcggggggtgagggagctggggctctggagctccagcaggtgcccatacgtgagcaatatcccagggaccaccctcctgcccacctcccggtgtgggacgtggcgaggcgcctgagctttgctgagaacttgccctacctgcctcgaggccttgcagcttcaccgggaactcttgtgctcacgctgctggccgcaccatgcactttttggaggaagggaccaacaggcagtcttcgttctgtgtcctgagtcttggcacacttcctttctgcagttacggggtcctaagccccagaagtctaatgccaggaagcctggaacgggggttctggtgagtgcagggaagagcaggtggagcatccatgctggccggggtgctggctgtgggcgggggtcccactctgggaactccccctccccttcctgggcccgctctctatgctctgcccagtgtagacatgctcaactctgtggccttgaagggtcacctggatacctctggagtcagccttgacctcccttctgacctccagtccccaactccaggcttacccagagttcccatgcatggtctctgctcccccatccccacccctcctccaccagccatcctcaactctccctttgctctcacccctacactgggttcccaaatcctgccagccctgctcttcagcagctcgcgtgcccactggcctccctgccttcgacgtcctgctccagggctccggtggggctgccctcatctctgtgacagcctcagacttgtctccccatccccatcagccctgtcccccttcttctcacagcagctggagtgatctttccagaacataaggtaggaggctctccatgatctgatcctgccttcctgacctccccagcctcatctctccctcctctgccctcgccctctgtgctccagccaacgtggcctgtcactcgtccacctgccatactgtcctgactccaggcctttgcctgtgctatggcctctgttgggaccactcttgtctctcccctgctgtgtctgctaattcccactcgtgtcagtgatccatggctgcagaacacaccactccatccatggaaaacaatcacaatcattgattactatctctccctgggcttcctggggtggactgggctcagctgggtggttcactttggggcctcagcagtcatgggcagacagtggctggggtcactgcaaagacttccctgcatctctggcagttgatgctggctgtcatctgagacacctacccagggcctctccctggggcctgggctcctgcttagcttggttgggaggctccaagaccaacatcccaagaaagatgagacagaagccagatcacctttttgggcctggcttcagaagtcacccagcatcacttctgctgcatttatttcttagaaacacagaatatcagaccccatctcttgatgggagggggcctcatggtttgtagacatgttctgaaactccactctgcccggccttggcttcgacgtgtctggtgaatgtgtgggctgtgaggctccccgaacgtagacctcagactgcaacgctggccgttacagggtctggcacacgggcccacgtcaggcccatcgccacagtgatggttgttctgtgactgtttctggtggcctctgctccacactccaggctgacgctgtgccccttccactgggaccctcgggtggcttccatgcacttgtgccctaaatcctgctcctagactaaacttcatctcctgtgttctcattctgcagcatggctgttagggaacctgaccatctgcagcgcgtctcgttgccaaggtataatgtcagtgcctcccttcagtggctcccatgtcacagaattgtcctgcagccctggcacatgtgtgccatgtgggagctggggcaggtcctctttcctcctgtggctccgagggagggggccgctccttccccagtctctaccctgacttggccctcgtcctgcagccactcagagagcacgatggagctggagcttcagttttgaccaaatgcgtgtcgccggcttttgtgtgtgtgtgtgtgtgatggagtctcgctctgtcgcccaggctggagtgcattggcaccatctctgcccactgcaacctctgcctcctgggctcaagtgattctcctgcctcagcctcctgagtagctgggattacaggcgcccaccaccacacctggctaatttttgtatttttagcagagacagcgtttcaccatgttggccaggctagtcttgaactcctgacttcaaatgatccgcccgcctcagcctcccaaagtgctgggattacaggcatgagccccggcacctggccttcaaattggcttttaaagaagatgaccagctggtctgttctgtctggggccttggagggctgtttcccaggatgtgggcctttatcagtgctgacctaggcaatcaaggccaagctggccacactgcttttgattttttttaaattgtgatgaaatacgcttaacataaaatttgccatcttagtcattttggagtgttcagtagctttaagtccattcacattgctgtgcagccatcaccaccatccatctccagaactcttttcatcttgccaacctgaagctctgtccccataaaatagcaactccattttccctcccccagctcaccattccatggtctgttgttatgagtctgctactccaactaccttttataagtggagtcaatggtacctgtgtttttatgtcgggctcaaatcactgagcgtgatgtcctcacggtccatccaggttgtaccaagtgtcagaatttccttcctgttttctgctgactccctgcttttaaaggccatcttggacattcaaattgtggccattactgacagttaaaatggccccggctcatgtctcctgagcctctacaatcctttaggtggggacagtactgcggcccacacgtccccacaggctgcgtgtgacacctgacagtgctttgtgccactgtggagcaggtgtcactctcccacttctcagagaggaagccgggctctggaagccagcagcccacaaggaggcccagcaggcttcgggcccaggtggggaggtctgcacatctcagggcctttccctgggaacaaccagggacagaggccacacacccagcctcctctctgcccacagtgaattgagacacaaccccttacgtccctcccagccttaagtcaagtggaaagcaatggcccctgaggtcacttagtccctcttgccagtttgtaagtgctgaatcagagactctgagctttggccctttcccgagttcccgggattatgagctgacacagcccccaagcaaccacagtgattccagcctgggagtgtggccttggcgggagggtcaatgcccagtcatggttcagcggctgtgcacacccctgcttacctgcatcccacgctttccatgcaaactcacgtggcggcgctttgcgcttgcaggatggtctacccccagccaaaggtgctgacaccgtggtgagtaaagttactgacactgaaactgaacgcagctcaaggggctgttctgaaggtattagagggcggtttccttgatgtaaatctcagttggggctgcttcgttctctcctctcagattctcctgacatctgaattcagaggcccacatggctgtcctctttccctttgctttctctgacttgcgtctcttgtttcctgtccctttgttctccaaagcccctgcaaaggcctgataggtacctcctacctggggaggggcagcgggggttgggtgctggggagggtttgttcctatctctttgccagcaaagctcagcttgctgtgtgttcccacaggtccaatgttgagggagggctgggaatgatttgcccggttggagtcgcatttgcctctggttggtttcccggggaagggcggctgcctctggaagggtggtcagaggaggcagaagctgagtggagtttccaggtgggggcggccgtgtgccagaggcgcatgtgggtggcaccctgccagctccatgtgaccgcacgcctctctccatgtgcagtaggaaggatgtcctcgtggtaccccttggctggctcccattgtctgggagggcacattcaacatcgacatcctcaacgagcagttcaggctccagaacaccaccattgggttaactgtgtttgccatcaagaagtaagtcagtgaggtggccgagggtagagacccaggcagtggcgagtgactgtggacattgaggtctctccttgtgttcaagacagagtggggtggcggccagccttgtcctcccagagggtagatgggaaaggtcattcatgcagcatcttactgagctcatgtgggctcgtgggctcgtgggctcgccaggtcggtaaaacccagctccttctccagaggctgcgtctcacccagggatggtggcttctgctgccccctcctctctgtaactgtggccggccgtcatgctgagccaccccctcaatacaaggctccagatgtttcctgctcactgaccagagatagcaggagggggacacctgtttgctgtccttggaccctagaaagaggatgctggcagagccgtggtcacttctctgtcagatgtaggtggggcaggcaaagcagttggccccagacaccaaaggaagtggctgacccacaaggccctgggactctgggccaggccagagagggagctagccaggcaaccgcagacacatacttgacttctcggcagctgtgggcagctgggccagcgacagtggcggaggccaggaatgacttactcttaggaataggtgcagttcaagcctggagggaggaagctctagggtgcagaggcgggtgtgtggaggcctcgcgtgcagcttataatgagggagcacgtggccggcctggccataagaggggcagctgcgtggggaggcgtggctcaggccaggctgagggggagtgagcagacgccagcctgcggcctgctaccagcctccagccacctgccctcagccctccttagtaagagggggtgctggtggtcccccatcgctgggaagaggatgaagtgaatcgcagcccgaggactcgctcaggacagggcaggagaacgtggtgcatctgctgctctaagccttccaatggccgctggcgggcgggtgcaggacgggcctcctgcagcccaggggtgcacggccggcggctcccccagcccccgtccgcctgccttgcagatacgtggctttcctgaagctgttcctggagacggcggagaagcacttcatggtgggccaccgtgtccactactatgtcttcaccgaccagccggccgcggtgccccgcgtgacgctggggaccggtcggcagctgtcagtgctggaggtgcgcgcctacaagcgctggcaggacgtgtccatgcgccgcatggagatgatcagtgacttctgcgagcggcgcttcctcagcgaggtggattacctggtgtgcgtggacgtggacatggagttccgcgaccacgtgggcgtggagatcctgactccgctgttcggcaccctgcaccccggcttctacggaagcagccgggaggccttcacctacgagcgccggccccagtcccaggcctacatccccaaggacgagggcgatttctactacctgggggggttcttcggggggtcggtgcaagaggtgcagcggctcaccagggcctgccaccaggccatgatggtcgaccaggccaacggcatcgaggccgtgtggcacgacgagagccacctgaacaagtacctgctgcgccacaaacccaccaaggtgctctcccccgagtacttgtgggaccagcagctgctgggctggcccgccgtcctgaggaagctgaggttcactgcggtgcccaagaaccaccaggcggtccggaacccgtgagcggctgccaggggctctgggagggctgccggcagccccgtccccctcccgcccttggttttagcagaacgggtaaactctgtttcctttgtccgtcctgttgtgagtaactgaagcctaggccccgtccccacctcaaatcacacacaccccctccccaccacagagacaccattacatacacagacacacacagaaagacacacacagacacaaaatcacacacacaccctccccgccacagagacaccattacatacacagacacacacagaaagacacagacacaaaatcacacacacaccctccccgccacagagacacaccattacatacacagacacgcaatcgcagatacgcccttccggccacagaaacacaccattacacacacatacacagaaagacacacacagacacacaatcacacgcagcccctccccgccacagagacacaccattacatacacagacacacacagaaagacacacacagacacaaaatcacacacacaccctccccgccacagagacacaccattacatacacagacacacacagacacacaatcacacacagcccctccccgccacagagacacaccattacatacacagacacacacagacacacaatcacagataccccctcccggccatagagacacaccgttacacacacatacacagaaagacacacacagcccctccccgccacagagacacaccattacatacacagacacacacacacacacaatcacacacacaccccccgccacagagacacaccgttacatacacagacatacacacacacacagacatacaccagacacgcaaagacacacagacacagatacacagatacaaagacacagacatatagacacacagacatgcacagagacacatggagacacatgcaaaaatgcacagagaaagacatacagaagtgtacacacagacacatagaccacacagacacacagacatgcatgcaaacacacagacatgcagacatgcacacaaacacagactcacgcacacagacttaggcagcccaaattcagcgcctggggcataagttcctggaggggtggccaccttcagcccccacggtaaggtcctgaggaaccttccccttagacaagggatcatggaggaggtctcttccggagcctggagggaggcctcaagtggtccttccacctcggcatcccaaagtgctaggattataagcatgagccactgcacctggccccaacatcatttattgaacagactgtcgtttccacattgtgtttcttggcatttctgtcaaaaatcagttgaccgtaaatgcatggattcacttccgggctctctattctgtttcattggtctgtttgtttttatgccaataccatgatgttttgattattatagctttatagtatatcttgaagttaggtagtgtattgtctccagctttgttctttttgcttaagattgctttggctatttaggggtctttgtggccattactgacagttaaaatggccctggctcatgtctcctgggcctctacagtactttaggtggggaagtactgtggcccacatgtcccaacaggctgtgtgtggcacctgacagtgctttgtgccactgtggagcaggtgttactccctcatacgaattttaggattattttatttatttcagtgaaaaatgtcaatgaaattttgatagggattgcattgaatctgtagattgtttggggttgtatggacattttaacaatattaattcttccaattcatgaacatgggatgtcttttttttggcacctgatctcagatatgggacagctttctaattatttgtatcttcaatttctttcacaaatgttttatagttttcagcatacagatctttcacttccttggttggatttatttgcaagtattttttgtagctattgtaaatgacattgttttcttgatttctttgttagggtatagaaatgctacagattgttgtatgttaattttatatcctgcaactttactgatttcatttattctaacatcttattggtggaatctttagggttttctataagatcatgtcatctgtaaacagggacaatttaagttcttcctttccaatttggataccttttatttcttcctcttgcctaattattttggctgagggccaacttgttgggtttgttgttgttggtttttgtctgtgtcttttggtgtttcgtgttgctggcttttccagcacacagtcacagatatatgaggcagaaagaaaacccagggaactcctgtcatgtcattcctcaggtcccaaggtccctacatggtctgccttcttctctccaccttttagtgtttgatatacatacgtttatgtatgtagttatatatgtatgtgtaatacccagggaaatatacagagattttaactgtccttagtgtagggcgtggggacaggtgcatctattctaccttgcttggaagtggaaaaatcttcaagaaatcaatttatcaccaactggcatgacagaactcctggtttagtgtctagctgtctccactaaaatcaatcaccatgccatcaggcactctcttccctctggtgtgtactggtacctgaaacagcgtccagcaccctgagagcacagaacgcagcttcttatgtgccccacccaataatcccaaatcgagcacagacctgggagctgaagagacaagctggaggtcaggcagttctattacttaagcctggttcttcctgactccaaaagccaggcgccaccccatgctccttcccagcagaagctggttttcaccgggtcaggaggacaggatggctattcctgaccgttgtacagcagtgccacatctcctagtttccagaacatttaatgtgttgctgtggaggcctggcagctctgaagtagccccttgcgcccaggacaaaccgggcctggaggggtggggtggggtaagctgaagcttccagtatcccacgtgggcattctgttgctgagggcaaccgcccctccctgcaagggaggggaaggagcaggcaggcacacccttcctccctccacatttcactggagttgacctgtgtcctactgtggttgcacctggaccagcccagagggactggagtgactcttcccgcaggtagggcacagccagcctgggcacagggcctcactgcaatccctgcgccccgcctccctgggggatttccaggggttgtcctgctgcttggtgagctgggggtgtgggggaccacagatgaggcaggcgcctaaattgcttgggcggagtccggctgctctctccctccaggccctttcctgtgtcctcgggcccctcgggtccctgcaccaggccagcagcaatcgggtgtcagaggttcaagtccaggctgactcctgggacgcaccgactttgcccaggagggctggggagagggcagccccaaagtgtcatctttgattattctttgtccccaaagccagccttgggcatgtgcccagcacagggagagctgctgcctctgtgggcttgagtcatttttgcttccttgcccctctctgctctgtttggtttaaaaaacaaaaaccaacacccatgggtgaggcgaggcgaggcgaggcttgccttgatccacccgcttcctcccctgcagcctcgggccccatcctcccgcgtggccgcactaggggtgctgggggcggagtggggaccagacctgagtgggttctgggttcagcttcgcagcaggagcagctggggcatcatcagttgggcaggtgacccaggatctgagcaggaatcttccaggtggaggtggggccgcccctctgcttgccacagctgccttctgctctgggggcagcactggctgagaatccagtgaagtaaggcctttgaaatggttttgattgtaaaagtaatgtttatgtttagccattcctttttttattttttattttttgagacgggtctccctctgtcacccaggctggagtgcagtcgtgaaatgtgggctcactgcaacctccacctcccaggttcaagtgattctcctgcctcagcctcctgagtagttgggattacaagtgcctgccaccacacctgactaagttttgtattttttagtagagatggagtttcaccatgttggccaggctggtctcaaactcatatcctcaagtgatccaccctcctcgtcctcccaaagtgctgggattttgccatgagccaccacgctcagccatgtttagccatttttaaaaggtgtgaacagataattaagtctattagcaacattagaaaatttaagttaaaatttaaatgactctagcaagaattagcctttaggtgccctgggtccccctcctcaccgccccccaccccgccgccttctgagaagcgttttgtaatttttcttatttataaaatgggtttgattcaaaactgacttttcctcttcacagtctcacaggtccttccccaggtccaagaggctcttctgtgtcctgatgacaagtagctgcctagccgtggtggcacctcctatcacatgttaagggacccctccccagggccacacctggcagaaggtggcttatgatgttcgcagcttgaaagtagtgtaaaccaaagataaaattctaagcccactcccccagccatcggaatggacccctcctcttggccagggcactccaaagttaacctgaaaaaccggttcaggctgtgaagagaaggtggagtggacatgcctcatttatgtcctcctcccttttggaattcagcaaagctgaccagcatgaacattaacacagaccttaagtctgattagtggcatttacaatctatactctctgaagcgtgctacctggagtcttcctttgcatgataaaactttggtctccacaaccccttatcataacctagacactcctttctagtgataataactctttcaaccaattgccaataaaaaaattttgaatctacctataacctggaacctccccgctccaccttcgagttgtcctacctttctggacagaagcaatgtggatcttgcatgtatttgattgatgtctcatgtctccctaaaatgtatacaattaggctgtgcccagatcaccctgggcacatgttctcaggccctcctgaggtctctgtctcgggccattggtcactcagattcggctcagaataaatctcttcaaatatt

SEQ ID NO: 52 - DNA, 24814 bp, Homo sapiens
aatatttgaagagatttattctgagccgaatctgagtgaccaatggcccgagacagagacctcaggagggcctgagaacatgtgcccagggtgatctgggcacagcctaattgtatacattttagggagacatgagacatcaatcaaatacatgcaagatccacattgcttctgtccagaaaggtaggacaactcgaaggtggagcggggaggttccaggttataggtagattcaaaatttttttattggcaattggttgaaagagttattatcactagaaaggagtgtctaggttatgataaggggttgtggagaccaaagttttatcatgcaaaggaagactccaggtagcacgcttcagagagtatagattgtaaatgccactaatcagacttaaggtctgtgttaatgttcatgctggtcagctttgctgaattccaaaagggaggaggacataaatgaggcatgtccactccaccttctcttcacagcctgaaccggtttttcaggttaactttggagtgccctggccaagaggaggggtccattccgatggctgggggagtgggcttagaattttatctttggtttacactactttcaagctgcgaacatcataagccaccttctgccaggtgtggccctggggaggggtcccttaacatgtgataggaggtgccaccacggctaggcagctacttgtcatcaggacacagaagagcctcttggacctggggaaggacctgtgagactgtgaagaggaaaagtcagttttgaatcaaacccattttataaataagaaaaattacaaaacgcttctcagaaggcggcggggtggggggcggtgaggagggggacccagggcacctaaaggctaattcttgctagagtcatttaaattttaacttaaattttctaatgttgctaatagacttaattatctgttcacaccttttaaaaatggctaaacatggctgagcgtggtggctcatggcaaaatcccagcactttgggaggacgaggagggtggatcacttgaggatatgagtttgagaccagcctggccaacatggtgaaactccatctctactaaaaaatacaaaacttagtcaggtgtggtggcaggcacttgtaatcccaactactcaggaggctgaggcaggagaatcacttgaacctgggaggtggaggttgcagtgagcccacatttcacgactgcactccagcctgggtgacagagggagacccgtctcaaaaaataaaaaataaaaaaaggaatggctaaacataaacattacttttacaatcaaaaccatttcaaaggccttacttcactggattctcagccagtgctgcccccagagcagaaggcagctgtggcaagcagaggggcggccccacctccacctggaagattcctgctcagatcctgggtcacctgcccaactgatgatgccccagctgctcctgctgcgaagctgaacccagaacccactcaggtctggtccccactccgcccccagcacccctagtgcggccacgcgggaggatggggcccgaggctgcaggggaggaagcgggtggatcaaggcaagcctcgcctcgcctcgcctcacccatgggtgttggtttttgttttttaaaccaaacagagcagagaggggcaaggaagcaaaaatgactcaagcccacagaggcagcagctctccctgtgctgggcacatgcccaaggctggctttggggacaaagaataatcaaagatgacactttggggctgccctctccccagccctcctgggcaaagtcggtgcgtcccaggagtcagcctggacttgaacctctgacacccgattgctgctggcctggtgcagggacccgaggggcccgaggacacaggaaagggcctggagggagagagcagccggactccgcccaagcaatttaggcgcctgcctcatctgtggtcccccacacccccagctcaccaagcagcaggacaacccctggaaatcccccagggaggcggggcgcagggattgcagtgaggccctgtgcccaggctggctgtgccctacctgcgggaagagtcactccagtccctctgggctggtccaggtgcaaccacagtaggacacaggtcaactccagtgaaatgtggagggaggaagggtgtgcctgcctgctccttcccctcccttgcagggaggggcggttgccctcagcaacagaatgcccacgtgggatactggaagcttcagcttaccccaccccacccctccaggcccggtttgtcctgggcgcaaggggctacttcagagctgccaggcctccacagcaacacattaaatgttctggaaactaggagatgtggcactgctgtacaacggtcaggaatagccatcctgtcctcctgacccggtgaaaaccagcttctgctgggaaggagcatggggtggcgcctggcttttggagtcaggaagaaccaggcttaagtaatagaactgcctgacctccagcttgtctcttcagctcccaggtctgtgctcgatttgggattattgggtggggcacataagaagctgcgttctgtgctctcagggtgctggacgctgtttcaggtaccagtacacaccagagggaagagagtgcctgatggcatggtgattgattttagtggagacagctagacactaaaccaggagttctgtcatgccagttggtgataaattgatttcttgaagatttttccacttccaagcaaggtagaatagatgcacctgtccccacgccctacactaaggacagttaaaatctctgtatatttccctgggtattacacatacatatataactacatacataaacgtatgtatatcaaacactaaaaggtggagagaagaaggcagaccatgtagggaccttgggacctgaggaatgacatgacaggagttccctgggttttctttctgcctcatatatctgtgactgtgtgctggaaaagccagcaacacgaaacaccaaaagacacagacaaaaaccaacaacaacaaacccaacaagttggccctcagccaaaataattaggcaagaggaagaaataaaaggtatccaaattggaaaggaagaacttaaattgtccctgtttacagatgacatgatcttatagaaaaccctaaagattccaccaataagatgttagaataaatgaaatcagtaaagttgcaggatataaaattaacatacaacaatctgtagcatttctataccctaacaaagaaatcaagaaaacaatgtcatttacaatagctacaaaaaatacttgcaaataaatccaaccaaggaagtgaaagatctgtatgctgaaaactataaaacatttgtgaaagaaattgaagatacaaataattagaaagctgtcccatatctgagatcaggtgccaaaaaaaagacatcccatgttcatgaattggaagaattaatattgttaaaatgtccatacaaccccaaacaatctacagattcaatgcaatccctatcaaaatttcattgacatttttcactgaaataaataaaataatcctaaaattcgtatgagggagtaacacctgctccacagtggcacaaagcactgtcaggtgccacacacagcctgttgggacatgtgggccacagtacttccccacctaaagtactgtagaggcccaggagacatgagccagggccattttaactgtcagtaatggccacaaagacccctaaatagccaaagcaatcttaagcaaaaagaacaaagctggagacaatacactacctaacttcaagatatactataaagctataataatcaaaacatcatggtattggcataaaaacaaacagaccaatgaaacagaatagagagcccggaagtgaatccatgcatttacggtcaactgatttttgacagaaatgccaagaaacacaatgtggaaacgacagtctgttcaataaatgatgttggggccaggtgcagtggctcatgcttataatcctagcactttgggatgccgaggtggaaggaccacttgaggcctccctccaggctccggaagagacctcctccatgatcccttgtctaaggggaaggttcctcaggaccttaccgtgggggctgaaggtggccacccctccaggaacttatgccccaggcgctgaatttgggctgcctaagtctgtgtgcgtgagtctgtgtttgtgtgcatgtctgcatgtctgtgtgtttgcatgcatgtctgtgtgtctgtgtggtctatgtgtctgtgtgtacacttctgtatgtctttctctgtgcatttttgcatgtgtctccatgtgtctctgtgcatgtctgtgtgtctatatgtctgtgtctttgtatctgtgtatctgtgtctgtgtgtctttgcgtgtctggtgtatgtctgtgtgtgtgtgtatgtctgtgtatgtaacggtgtgtctctgtggcggggggtgtgtgtgtgattgtgtgtgtgtgtgtgtctgtgtatgtaatggtgtgtctctgtggcggggaggggctgtgtgtgtctttctgtgtatgtgtgtgtaacggtgtgtctctatggccgggagggggtatctgtgattgtgtgtctgtgtgtgtctgtgtatgtaatggtgtgtctctgtggcggggaggggctgtgtgtgattgtgtgtctgtgtgtgtctgtgtatgtaatggtgtgtctctgtggcggggagggtgtgtgtgtgattttgtgtctgtgtgtgtctttctgtgtgtgtctgtgtatgtaatggtgtgtctctgtggcggggaggggctgcgtgtgattgtgtgtctgtgtgtgtctttctgtgtatgtgtgtgtaatggtgtgtttctgtggccggaagggcgtatctgcgattgcgtgtctgtgtatgtaatggtgtgtctctgtggcggggagggtgtgtgtgtgattttgtgtctgtgtctttctgtgtgtgtctgtgtatgtaatggtgtctctgtggcggggagggtgtgtgtgtgattttgtgtctgtgtgtgtctttctgtgtgtgtctgtgtatgtaatggtgtctctgtggtggggagggggtgtgtgtgatttgaggtggggacggggcctaggcttcagttactcacaacaggacggacaaaggaaacagagtttacccgttctgctaaaaccaagggcgggagggggacggggctgccggcagccctcccagagcccctggcagccgctcacgggttccggaccgcctggtggttcttgggcaccgcagtgaacctcagcttcctcaggacggcgggccagcccagcagctgctggtcccacaagtactcgggggagagcaccttggtgggtttgtggcgcagcaggtacttgttcaggtggctctcgtcgtgccacacggcctcgatgccgttggcctggtcgaccatcatggcctggtggcaggccctggtgagccgctgcacctcttgcaccgaccccccgaagaacccccccaggtagtagaaatcgccctcgtccttggggatgtaggcctgggactggggccggcgctcgtaggtgaaggcctcccggctgcttccgtagaagccggggtgcagggtgccgaacagcggagtcaggatctccacgcccacgtggtcgcggaactccatgtccacgtccacgcacaccaggtaatccacctcgctgaggaagcgccgctcgcagaagtcactgatcatctccatgcggcgcatggacacgtcctgccagcgcttgtaggcgcgcacctccagcactgacagctgccgaccggtccccagcgtcacgcggggcaccgcggccggctggtcggtgaagacatagtagtggacacggtggcccaccatgaagtgcttctccgccgtctccaggaacagcttcaggaaagccacgtatctgcaaggcaggcggacgggggctgggggagccgccggccgtgcacccctgggctgcaggaggcccgtcctgcacccgcccgccagcggccattggaaggcttagagcagcagatgcaccacgttctcctgccctgtcctgagcgagtcctcgggctgcgattcacttcatcctcttcccagcgatgggggaccaccagcaccccctcttactaaggagggctgagggcaggtggctggaggctggtagcaggccgcaggctggcgtctgctcactccccctcagcctggcctgagccacgcctccccacgcagctgcccctcttatggccaggccggccacgtgctccctcattataagctgcacgcgaggcctccacacacccgcctctgcaccctagagcttcctccctccaggcttgaactgcacctattcctaagagtaagtcattcctggcctccgccactgtcgctggcccagctgcccacagctgccgagaagtcaagtatgtgtctgcggttgcctggctagctccctctctggcctggcccagagtcccagggccttgtgggtcagccacttcctttggtgtctggggccaactgctttgcctgccccacctacatctgacagagaagtgaccacggctctgccagcatcctctttctagggtccaaggacagcaaacaggtgtccccctcctgctatctctggtcagtgagcaggaaacatctggagccttgtattgagggggtggctcagcatgacggccggccacagttacagagaggagggggcagcagaagccaccatccctgggtgagacgcagcctctggagaaggagctgggttttaccgacctggcgagcccacgagcccacgagcccacatgagctcagtaagatgctgcatgaatgacctttcccatctaccctctgggaggacaaggctggccgccaccccactctgtcttgaacacaaggagagacctcaatgtccacagtcactcgccactgcctgggtctctaccctcggccacctcactgacttacttcttgatggcaaacacagttaacccaatggtggtgttctggagcctgaactgctcgttgaggatgtcgatgttgaatgtgccctcccagacaatgggagccagccaaggggtaccacgaggacatccttcctactgcacatggagagaggcgtgcggtcacatggagctggcagggtgccacccacatgcgcctctggcacacggccgcccccacctggaaactccactcagcttctgcctcctctgaccacccttccagaggcagccgcccttccccgggaaaccaaccagaggcaaatgcgactccaaccgggcaaatcattcccagccctccctcaacattggacctgtgggaacacacagcaagctgagctttgctggcaaagagataggaacaaaccctccccagcacccaacccccgctgcccctccccaggtaggaggtacctatcaggcctttgcaggggctttggagaacaaagggacaggaaacaagagacgcaagtcagagaaagcaaagggaaagaggacagccatgtgggcctctgaattcagatgtcaggagaatctgagaggagagaacgaagcagccccaactgagatttacatcaaggaaaccgccctctaataccttcagaacagccccttgagctgcgttcagtttcagtgtcagtaactttactcaccacggtgtcagcacctttggctgggggtagaccatcctgcaagcgcaaagcgccgccacgtgagtttgcatggaaagcgtgggatgcaggtaagcaggggtgtgcacagccgctgaaccatgactgggcattgaccctcccgccaaggccacactcccaggctggaatcactgtggttgcttgggggctgtgtcagctcataatcccgggaactcgggaaagggccaaagctcagagtctctgattcagcacttacaaactggcaagagggactaagtgacctcaggggccattgctttccacttgacttaaggctgggagggacgtaaggggttgtgtctcaattcactgtgggcagagaggaggctgggtgtgtggcctctgtccctggttgttcccagggaaaggccctgagatgtgcagacctccccacctgggcccgaagcctgctgggcctccttgtgggctgctggcttccagagcccggcttcctctctgagaagtgggagagtgacacctgctccacagtggcacaaagcactgtcaggtgtcacacgcagcctgtggggacgtgtgggccgcagtactgtccccacctaaaggattgtagaggctcaggagacatgagccggggccattttaactgtcagtaatggccacaatttgaatgtccaagatggcctttaaaagcagggagtcagcagaaaacaggaaggaaattctgacacttggtacaacctggatggaccgtgaggacatcacgctcagtgatttgagcccgacataaaaacacaggtaccattgactccacttataaaaggtagttggagtagcagactcataacaacagaccatggaatggtgagctgggggagggaaaatggagttgctattttatggggacagagcttcaggttggcaagatgaaaagagttctggagatggatggtggtgatggctgcacagcaatgtgaatggacttaaagctactgaacactccaaaatgactaagatggcaaattttatgttaagcgtatttcatcacaatttaaaaaaaatcaaaagcagtgtggccagcttggccttgattgcctaggtcagcactgataaaggcccacatcctgggaaacagccctccaaggccccagacagaacagaccagctggtcatcttctttaaaagccaatttgaaggccaggtgccggggctcatgcctgtaatcccagcactttgggaggctgaggcgggcggatcatttgaagtcaggagttcaagactagcctggccaacatggtgaaacgctgtctctgctaaaaatacaaaaattagccaggtgtggtggtgggcgcctgtaatcccagctactcaggaggctgaggcaggagaatcacttgagcccaggaggcagaggttgcagtgggcagagatggtgccaatgcactccagcctgggcgacagagcgagactccatcacacacacacacacacaaaagccggcgacacgcatttggtcaaaactgaagctccagctccatcgtgctctctgagtggctgcaggacgagggccaagtcagggtagagactggggaaggagcggccccctccctcggagccacaggaggaaagaggacctgccccagctcccacatggcacacatgtgccagggctgcaggacaattctgtgacatgggagccactgaagggaggcactgacattataccttggcaacgagacgcgctgcagatggtcaggttccctaacagccatgctgcagaatgagaacacaggagatgaagtttagtctaggagcaggatttagggcacaagtgcatggaagccacccgagggtcccagtggaaggggcacagcgtcagcctggagtgtggagcagaggccaccagaaacagtcacagaacaaccatcactgtggcgatgggcctgacgtgggcccgtgtgccagaccctgtaacggccagcgttgcagtctgaggtctacgttcggggagcctcacagcccacacattcaccagacacgtcgaagccaaggccgggcagagtggagtttcagaacatgtctacaaaccatgaggccccctcccatcaagagatggggtctgatattctgtgtttctaagaaataaatgcagcagaagtgatgctgggtgacttctgaagccaggcccaaaaaggtgatctggcttctgtctcatctttcttgggatgttggtcttggagcctcccaaccaagctaagcaggagcccaggccccagggagaggccctgggtaggtgtctcagatgacagccagcatcaactgccagagatgcagggaagtctttgcagtgaccccagccactgtctgcccatgactgctgaggccccaaagtgaaccacccagctgagcccagtccaccccaggaagcccagggagagatagtaatcaatgattgtgattgttttccatggatggagtggtgtgttctgcagccatggatcactgacacgagtgggaattagcagacacagcaggggagagacaagagtggtcccaacagaggccatagcacaggcaaaggcctggagtcaggacagtatggcaggtggacgagtgacaggccacgttggctggagcacagagggcgagggcagaggagggagagatgaggctggggaggtcaggaaggcaggatcagatcatggagagcctcctaccttatgttctggaaagatcactccagctgctgtgagaagaagggggacagggctgatggggatggggagacaagtctgaggctgtcacagagatgagggcagccccaccggagccctggagcaggacgtcgaaggcagggaggccagtgggcacgcgagctgctgaagagcagggctggcaggatttgggaacccagtgtaggggtgagagcaaagggagagttgaggatggctggtggaggaggggtggggatgggggagcagagaccatgcatgggaactctgggtaagcctggagttggggactggaggtcagaagggaggtcaaggctgactccagaggtatccaggtgacccttcaaggccacagagttgagcatgtctacactgggcagagcatagagagcgggcccaggaaggggagggggagttcccagagtgggacccccgcccacagccagcaccccggccagcatggatgctccacctgctcttccctgcactcaccagaacccccgttccaggcttcctggcattagacttctggggcttaggaccccgtaactgcagaaaggaagtgtgccaagactcaggacacagaacgaagactgcctgttggtcccttcctccaaaaagtgcatggtgcggccagcagcgtgagcacaagagttcccggtgaagctgcaaggcctcgaggcaggtagggcaagttctcagcaaagctcaggcgcctcgccacgtcccacaccgggaggtgggcaggagggtggtccctgggatattgctcacgtatgggcacctgctggagctccagagccccagctccctcaccccccgccaccagtgccttggtcagtgcagtccctgaggccacgtcagggagtgtttccagaccgtgtccagagatgccccagtagaggtgacaggtgacttcactcttggttctgggaccttctgtgtctggaagcgactaacagcttgggacccagaattgccttccccacccccagccacgcaattgtgggcaaggggcttgctctcccagccccagactccacacttaggaaaattttaaatgggagtgagatgagcctgttgcccaggtgaggctaaaataagggagcaagtaagcacaccctccgccagagctggacgcaggcaataactgtccttaggaccctgataactgtgatacttggggagctcagggaggccccatgggtctgattggctgctgtggtcacttctccccaaaccaggccagcctcgatggtcaaatgtgtcttacccaaacaagaccaagacaagcattattaggaaaaggatcataggtcgaagtgcgtggcattttggttttcctggaaaacaggagtagaaaaatcacatcactcaccctccttctctcacctgccccactttacctgtcccgccttgtaattcaggcatcacaccctgcgacgggccttcatctgccaagatggtccctctgccccacaggtgatgctctgagccccacctgagcatctccaaacccagtccagatctggccctcctcccactcagagaagagggaggcggtctgctcctcccagctcatcagcccgactgctcctgcagactctgagagccaccccggcttcccattgacctccttccactcagcacccccttcccctgggagaccggaatgaaccacactgaaatgagcacgtcgaggtcactgtcgaacccaccgagggaggccaggacagcctcatggccaggctgagccaggagcccagaccagttcctgccagggagaggagccaccaacttcccctagtatctccctgctgtctcagaggctcatgttctggaaacaatcattgtctttaaggtgattttatgtatattaaagtcacgtacagtagttcccttatccacaccttcgcttgctggagtttcagttacccatggtcaaccaaaggccaataataggtgagtacagtacagtaaaatattttgaggacaggcatcgtggctcgtgcctataatcccaggactttgggaggctgagccagcagaattgctggaagccaggagttctagaccagcctgggcaacatagtgagaactcatttctatcaagaaaaaaaaaaaaaaaacaattagctgggcatagtggtgcatgcctctggtcccaggaggctgaggtggaaggatcacttgagcctaggaggtgaaggctgcagtaagccatgatcacaccactgcactccagcctgggtaacagagcaagaccctgtctcttaataataaacaaaactacaacaacaaaaaacccacaaactaagatatatacacatttttttttagagagaccacattcacgtaacctttattacagtatattgtttttgttgttgttgttgttttgttgttgtttttgagatggagttttgctcgttgcccaggctggagtgcaaaggggcaccttcggctcactacagcctccgcctcccgggttcaagcaattctcctgcctcagcctcccgagtagctgggtttacaggcgcccaccactacgcctggctaattttttgtatttttagtagagacaggtttcaccatgttggccaggctggtctcgatctcctgacttcaagtgatccacccgcctcggacagtatattgttataattgttctattttactattaattatggttgttaatcccacccggtgcctaatttataaattaaaccctatcataggtatgtgtgtacaggagaaaacatactctctgtagggtttggtactatctgtggtttcagacatccactggggatctcggaacctatcccccgcaggtaagaggggactatcgttttcacaagggcaagcctgaaaggcgtctatctcctggcccagttcctattccttcccccgaaatcagtccctttcaactaattcatctgttacttcttatcttataatgcttgtgtgtgtttacctccacctttctaagtcctgtgaccacggagcgatttatctcgaatagcttcttgaaacagaaacgtgggaggcaaaacatttgaactttacatgtcctaaattattttttccatttttgtagttggtagatcgtttggctgtagggaaatcttggtggaaataattttccttcaatgtggcaaaaatggttccattttttaaaactttgaaaattaatttaatttgagggataacttacatccaataaaatgtgcccactttaggtatacggttttgatgagtttcacacaatgtatgtacacatgtaatcaccccagtaaggtccctcctgaccctgacaaccatggatctgattccctggcgtttcccatacacggaatcctctgatacatgctcttttatgtctggccgcatcacaccgcatgctgttttgaagattcacctatattgtcacgtgtatcaatcgttcgttctttttcatttctgagaagcacgccattgttaatccgccacaattcatttattctgtctcctattgacagacactgtggttttttcactgttcggggccactagcaacaaagcttctgtaaacactcatgtgcaggtatttgtggacctgtgttttcatttcccttgagtaaataccaaggaatggaaaagatgggtcatatggtaagtgtatgtttaactttgtaagaaactgtgttccaaagtggtgactgaattttccattcccgccaggaatgtacgagaaccacagtccttgccaacacttgatggtcactcttttatcctttagccatgctagtggatgaggagtggtatctaagtgtgtccaatgactaaggaggtaaatcatcttttcatgtatttattggccatttgcttgcttcttatgaagcctgtccagatctttagctcattttattatttatttatttatttatttacttatatatatttttggggggcacagtcccactccagttgcccaggctggagtgtggtggcatgatcatggctcactacagcctcgacttcctgggctcaggtgatcctcccacctcagccttttgagtagctgagactataggcatgcaccacatctagctgattttttgtggttttggtagagatggggtttcaccatgttgcccaggctggtcttgaactcctgggcttaagcaatccacctgcctcagcctcccaatgtgctgggattacaggcataagccacctcacctggccctctatttttattttttttagacaggatcttactctgtcacccaggctggagtgcagtggcacgatcacagctcgctgcaacctcgaactcctgagcttaagtgatctttccccctcagcctcctgattaggtgggactacagacatgcaccaacatgcccggctaattattctactttttgtagacactgggtctcattaagttgtttctctttttattattgagcagaatttatttctatattttggatacaagtcctttgccaaatacaaatattacaaatattttctcgccaggcacagagagacagacactgcatgttctcacttatctgtagtatcaaaacatcgaaacaattaaactcatggagatagagaatagaaggatggttcgcagagacttggaagggtagtggcaggggtgagagggtatgtagggatggttaatgtgtacaaataaatagaaagaatgaataagacccagtatttgatagcataacagggagactatagtcaataataatttaattgcacatttaaaaataactaaaagagaggtcgggcacagtggctcatgcctgtaatctcagcactttgggaggccgaggcaggtggatcacctgagatcaggagttcaagaccagcctggccaacatggtgaaacctcatctctactaaaaatacaaaaactaaggccaggcgtggtggctcacgcccgtaaccccagcactttgggaggccgaggtgggtggatcacgaggtcaggcattcgagtctagcctgaccaacacggtgaaatcctgcctctactaaaaatacaaaaaattagctgggtgtggtggcgcatgcctgtaatcccagctacttgggaggctgaggcaggagaatctcctgaacctgggagacggaggttgcagtgagccgagattgcaccactgcactccagcccgggcgacagagcgagactccatctcaaaaaaaaaaaaagaagaaaaagaaaaaagaaaaaaaaagtttaaaaatacaaaaactagccgggcgtggtggtgggtgcctgtagtcccagctactcaggaaactgaggcaggagaatcacttaaacctgggaggcggaggttgcagtgagttgagatggcgccaccacactccagcctgggtgacagagcgagactccatctcaaaaaaaaaaaaaaaaagaataaaaataactaaaagagtatagttggattgtttgtaacacaaaggataattgctcaagaggatggataccagttctccatgatgtgaattttccattgtatgactgaaccacaatatctcagggaccccataaatatatacacctactatgaacccataaaatgaaaaacaaaatacttcttagaaaacaaatattttctttcagtcggtggcttatttattcatttttccttaatttttcttttgaagggaagtgttaatttttataaactctaatttatccttataaaaatgaaaccatttttatggtttgggcctttttttttttttgcctcatctattaaatttttgcctaccccaagttcatgaacattttctcttattttcttcagaattccataatttttgtgtattgtgtgaaaggctaaagtccctttcttccctcaatggatatccagtcatttcagccatttgaattgaaaatactttcctttctctatcacattaccttagcacccttatcaaaaagcaactcttaaaaaatcaatggactatttctgtgtaggtctatttctaaactctgcattctattccattgaactatctgtctatcctaatatcaacctattctgattactatgtaaaattttagaatcagctgtcaactttacaaaaatttcttctggagttttaagtgagattatgtggactctgtagatccatctggggagaagtgacagtttagcaatgtaagtcttccaatccatgagcatggtatatttctccatttatttatgtcttctttaatttttgtcatcaatattttgcagttttctgtttttttgtgaccttctttttctttttttttttttttttgtcagggtcttgctgtgtagcccaggctggaatgcactgcaatctctgcctactgggctcaagtcatcctctcacctcagcctcctgagtagcaggggctacaggtgcatgccaccatgcccagctaatttttttttttttttgtagagacagggtctcactatgtcacccaggctggtctcaaacttctgggctcaagtgatctggccaccttgacctcccaaagtgctgggattacaggcatgagccatggtgcctggtttatattgcagttttaattgtatagacatttctcctaatttggtaaattattctctaaatatttcatgttttatgatgctactgtaaatggtatttaaaatttttcatggttcaattgattgtggcaagtattatagaaaaataattgatttattcttgtttttcttttttcttttttttttttttttagactgtgtcttgccctgttgcccagtctggagtgcagtggtgtgatctccagtcactgcaacctctccctcctgggttcaagcaattctcatgcctcagcctcccaagtaggtgggattacaggcgcaccaccacactcaactttttttttttttttgtatttttgtaaagatggagtcttgccatgtgggccaggctgctctcaaactcctggcctcaagtgatctacctatcttggcctcccaaagtgctgggattgcaggtgtgagccaccacacccagcctgatttattcattgactttgtatcttgagaccttgctaagctgacttagctgatgggctcacagcataaacatatataatatatatgacaataatagcataaaggagcaaggaggcaatgaagttattatatatactggagcaaggaaaggtcaccagacaatagcttgaatatacaggaagaaatcaagagtaaagtcagtgataaatatacagtgtaatataaaagacttgaaaagtgtttttctccttacttgtcttactgaattgaaaagaaataagattgtgtgaaacaataattataacaccatgttgttgagtttataacatatatagatgaacatatacgacaataatactacaaaccacaagcaaggagggaggaaatggagttatactggagtcaagttcctgtattttactaaaattagtattaatctgaagtagatcctgataaattaaaatgcatattgtaatccctggagcaaacactaacaaaataactttaaaatatacacttaaaaagaaaaagggaatttaaatgctacactagaaaatacttaatacaaaagaaggtagtaaaagatgaacagaagaacaaaaaggcataaaacatagaaaacaaattgtgaactgatagatggaaatccaaccacagcaataataacattgaatgggaatagaatgaacatgccaatcaaaaggcagagatcgttagactggattttttttttaagctttgactatatgctgcctgtgagagacatacatactttagaaacaaagatacaaataggtcaaagcaaaaggatagtagatttgctatgcaaacaaccgtaagggagcttgaggagaaatgctaacgtcagactaaataatttttttgtttttttgagacagagtctcactctatcacccaggttggagtgcagtggcacgatcttggctgactgtaacctcagcctcccgggttcaagcaattctcgtgcctcagcctcccaagtagcagggattacaggcgcacaccatcacagctggctaatttttttgtattttcagtagagacggggtttcaccatgttcgccaggctagtcttgaactcctgacctcaggtgatccacctgccttggcctcccaaagtgctgggatcacaggcatgagccaccccatctggccaacttttttaagatcaaaaatcttactaaagagaaacattctgccatgatataaagtgaatacatcacgaaaatataacaaacagaaatatatacatacctgacaacctagccccaaaatactagaacaggaattaaaagaaattaaaaactgtgtaagcaaaaactcagttgtatgtaaaaaaccaattccccttgaggaagagaaagggctggagtcctttaaaaattaactggctgtttttctgtggctagtgagccttatctctccctttcccaggcattgcgaagactctgtttctctagctgtgcagctgcaaggtcactaaacagataatcttgagtcataaaacgtgttgttccttgaaaagtaagaaataatgtaatgcatgtcttaactgaataactgtctttgtttcttgcttctgtaatactcttccccctgcacaaatctccccccaccccacaaaatgcttaaaaggtagcttgactctttgtttggggcccagtcctttggatgttaatctgattgggtcggtgcacctaaataattaaataattcctcctcaaccccatcggtctctctgattccttaattatcccgcagcaatacatgaagcaaaaactcacagaattgaagggtgaaacagtcaattcaccagtaatggttgggccaggcatggtgactcacgcttgtaatcccagcactttgggaggccgaggtgggtgggtcacttgagcccaggagttcgtgaccagcctaagtaacatggcaaaaccctgtctataaaaaatgcaaaaatcagctaggcatgatggtacttgcctgtagttgcagctactcaggaggctgaggtgacctaagccttgggaggtgggggctgcagtgagctgtgatcataccactgcactccagcctgggtgacaaagtgagactccacctcaaaaaaaaaaaaaaacaaacaaaaaaaaaaaaacaaaaaaacaataattggacaccaaaatcctaccccactctcagtaatggatagaataattagaaagaaaatcagtagatacaaatgacttgacatcactggacaccaactgacatctctagaacactccacctggcaagagccgaagtcacgttctcctcaagtgcacatggaacagtgtccaaggtcaatcatatgctggaccataaaacaattctgagaaattcgaaaggactgatatccacagagtttcttctctagccacaggggaatgaaatcagaaattaacaaaagaaatttgggaaacctataaatacatagaaattaaacaacataattctaaataagcaatgggtcaaagaagaaaatcaaaagatacactgagctgaatgaaaatgtaaacacaacataccaaaatttatgagatataactaaagctgtgtttcaagggaaatttatagctgtaaatgtctacattagaaaaaaaaatcttaaatcaagtgtgtaagcttccattgtaagtaactacaataagaaaagacagaacgaattaaacccaaagtgagaagagtggaaaccaatgaactagagaacagaaagaaaaagataaagtaaaaaaatatcaaatggcagttctctgaaaagatcaagagaattgacaaagctttagctacattgaccagagagagagagaacacaaataactaaaatcaggactaaaagaggagacagcaattccaatcttacagagattaaaaggatttcaaggaaatactatgtacaactgtttgccaacaaattatgcaacttaggtaaaatggacagattcttacacataaactagaaagcggttagaagaaaatataagattaaatctttgtgacactggattaagatttcttagatatgataccagatacacaataaaagaaaaagttaataaattggaatggatcaaaatgtaaaacttttctacttcaaaataccaataaaaaagtgttaaactattgatggttgaaaatatttgcaaatcatatatctggtgtgtatatatatatatatatatatatatatatatatatatatatgatactgtgtatgtaaagaactctcaaaactgaacaaaggagacaactcaatttttaaaaaggcaaaacatttcaataggcatttcaccaaaaacatatacaaatggctaaaaagcacaagaaaagccacttgccatcatttgaccttggggaaatgcaaatcaaaactataatgagataccaccttttacccacaagaatggtatgtattgctgcagacgtacagacagtggaaccctcagccaggcgcagcggctcacacctataatcccaggacttggggaggccgaggtgggcagatcacttgagcccaggagtttgagaacagcctgggcaacatggcaaaaccccatctctaccaaaaatacaaaaattagctggatgtggtggtactcacctgtagtcccagctactcaggaggctgaggtgggaggaccaattgagcccaagagattgaggctgcagtgagccaagatcatgccactgcactccagcctgggtgacagagcaaaaccttgtctcaagaaaagaaaaaggaaaagaaaattagaaccgttatacactgctgatgggaatgtaaaatggggcagtcactttggaaaacagtttgctagtttcttaaaatgttaaatcagactttctgtatgacccagcaattcctctgctgggtatcaacccaagagaaatgaaaacatgttcacacaaagtcttgtacacaaatgttcatagcagtgctgcgtgcagtttaaaatagctaaaaaagcagaaacagccgaaatgtccttcagctgatgaatggataaacaaaatgtggtctatctgtacaatggattattcagtaataaaaaggaattaaatactgatacatactacaacatacatgaatctcggaatcattattctaagtgaaggaagtcagatgcaaaagaccatgtaacacaggactccattcataggaactgtccagaaaaggcaagactggagagacagaaagtgattgtctgaggccaggtgggaatggggaatgactgcggaggagttccagggagttttggtgggctggggatggaaaagttataaaatttatttcacaactctgtaaactaactgaaaataattcatttgaaacaggtgaattttatggcatatcaatgacacggcaataaagctgtttctttcaatggtgccatcaaccccagccccttgaccctaagctgaaggaagagagatgctaggtgtgttcagtagggctccgtcaaagctgattttttgaagttatgggcagcattccgagtaagatgtgttgtggcaggtcaggtctcactaacgcaggcctccctaacaactgtttcagtactgactgagtggttaaattaaatattaaaagccagtgcccttataaaaaggctggaatataacaaaatcccaccaagagttttgcctagacctttcctgggccttcaagcatgacaaaataacgaaggaattcttaacaggacccatttaggattaaacaagttttattggggatctgaagaaattccccaggactccacaaataagtttactgggggtctgaaggaacttcccaaacccccatgatttaggagacaagataagggttttagattaagtaaatttactgaggatccagaggaaggtcttcaggactcagaccttagttatagattaacataagtcaattacttatgtcttgagatgaatgcacacttacacatagacatatagcttagaaggtatataagctctggaaaactttgtaattttgagttggtctggagataatttccaggtcttctccttgtaactggttacagaaataaaaactctctttctccccagttcatctgcatctcgttattgggccgcgagagatagcagccccaccctcagtttggtccaggaacagtttgatctcttcttggccaatctctggtgagacccaccagaatggaggagagccgggactgggtgcactgccagcttccaaaactcctgcacgtggtctcagtcctccagggattatgatgggtgtgaaggagctgagcattctctaaggagccagcacatgacacccagctcaccgcccaccaaccacatcctcaccgtcatctccaaggctctctcatgtcctcttcctgcctttcgggggatcactccctctgactccactaccctgctctcctgcccgccccaacaagcctgactgatttgtggagccgggccttccccatgtgagctcttctccctggcatgcttgtcccccagatttccacacactgggtccctcgccattggtgtccctaaggacaccagctcaccagctcctggctgcaggcaccttctagcacaggcctgcttgttctcatcagtgttcaaccaacattggttggatgactaaatcaacatgcagaatgtgggtaacctgagaatgggcactcatttgccaggtttctcaaagacctaacctcttagtcttcaagacgtttgtcttgggtgcggtcatgggccagagccagtgccagaaccccaggagtatagagaccaactgcccgaccctggtcctccaaggctccctgacatgagaccaactaagacagcataacccgtggggcaggacagactcctggggtggcagctgtgttcatcatcttgactgggtcaagatgtatccagctgtacctttcatgtgcggtttattgtatacatccgttgaaacatattaagacaaaaaagggaaaacaaagaccacaaaggagggacagggaagaacccggaaggcgctggcagcacagggaggaggcaggtgtttgcagtcagacctgagtcccaggccccactcagcccttcctgcctaggaccagagcactgtcccagatctctccaaacctgttttcccgtgggtgaaagaatgacccgggaagtatttaccgttccttcctgagaactcagcgatactgaacacagtgctgcctcacagtaaacactgacaaatggtgagcattactgagggcagggcctcgacctacaccatacccggttttcttcatgaattttccactcctctgcctcccgctcctccagggctgcacctccggggcaggagccctcaccaagtcaggcctcagtatgccttatccgccacctgattccaaatcaaagtaaaacatctctccccagatgtgtacacagcactcctctaaattaaagggctgtgtgctggctctgggtaccccacccggctctccctggcctttggcgttggggttcactggcctgcagcctgcaccccgtggccctgcgttctgcatccctccctctgaagcgacgttgttgtctgggtaaatactcaattcatcttctggcgccaagaaaattaaggacaggtgatccaccctcggcctcccaaagtgctggggttacaggcctgagtcaccgcatctggttgcctcaataatttcttcttaactcctatatcacctgagggcccggggcacagttcccccgtcacgcttggcattgaacttgcccacctcgccttcccgaggcgcctccgcgtttggggtatggaggctgttcccggtcaacccgggcgcctggccgccgtgcccgagggaagggctggggggcgggcagggcagcccagagccttgtcctagtccagggtcgggcggtaggtgctgaaaatagcagctcatggaaggcggggagcgtggaggggcgaggagaggctggagaccgccacggcgtcgagggaccccgctctcaccaggacccggggaccccggagacgagccccccgccaggccgcgccaccgcgcccatcctccctgcgggtcccaggcacccacagcgcggccgagcccacctgcccgccggctccccaggacgcagggtctcggaggctggggcggcggccggcccgaagcctcgcagccctgagcgcccccaccccggcccggctgtcgggtgcaccccgcattccctgcggtagcggctccctcgcgggcacccggggccgaggcctgcactcaccggccagcgtccgcaacacctcggccatggctccgcgtctggtctcggcctcc

SEQ ID NO: 53 - DNA, 20 bp, Homo sapiens
ggccagcgtccgcaacacct

SEQ ID NO: 54 - protein, 9 aa, Homo sapiens
MAEVLRTLA

SEQ ID NO: 55 - protein, 24 aa, Homo sapiens
GKPKCHALRPMILFLIMLVLVLFG

SEQ ID NO: 56 - DNA, 20 bp, Homo sapiens
ggatcataggtcgaagtgcg

SEQ ID NO: 57 - protein, 19 aa, Homo sapiens
YGVLSPRSLMPGSLERGFC

SEQ ID NO: 58 - protein, 16 aa, Homo sapiens
MAVREPDHLQRVSLPR

SEQ ID NO: 59 - protein, 12 aa, Homo sapiens
MVYPQPKVLTPC

SEQ ID NO: 60 - DNA, 20 bp, Homo sapiens
gatgtcctcgtggtacccct

SEQ ID NO: 61 - DNA, 20 bp, Homo sapiens
gccagccaaggggtaccacg

SEQ ID NO: 62 - DNA, 20 bp, Homo sapiens
aatgtgccctcccagacaat

SEQ ID NO: 63 - protein, 6 aa, Homo sapiens
RKDVLV

SEQ ID NO: 64 - protein, 38 aa, Homo sapiens
TPWLAPIVWEGTFNIDILNEQFRLQNTTIGLTVFAIKK

SEQ ID NO: 65 - protein, 229 aa, Homo sapiens
YVAFLKLFLETAEKHFMVGHRVHYYVFTDQPAAVPRVTLGTGRQLSVLEVRAYKRWQDVSMRRMEMISDFCERRFLSEVDYLVCVDVDMEFRDHVGVEILTPLFGTLHPGFYGSSREAFTYERRPQSQAYIPKDEGDFYYLGGFFGGSVQEVQRLTRACHQAMMVDQANGIEAVWHDESHLNKYLLRHKPTKVLSPEYLWDQQLLGWPAVLRKLRFTAVPKNHQAVRNP

SEQ ID NO: 66 - DNA, 203 bp, Homo sapiens
gtgggggcggccgtgtgccagaggcgcatgtgggtggcaccctgccagctccatgtgaccgcacgcctctctccatgtgcagtaggaaggatgtcctcgtggtaccccttggctggctcccattgtctgggagggcacattcaacatcgacatcctcaacgagcagttcaggctccagaacaccaccattgggttaactgtgt

SEQ ID NO: 67 - protein, 6 aa, Homo sapiens
RKDVLV

SEQ ID NO: 68 - protein, 33 aa, Homo sapiens
TPWLAPIVWEGTFNIDILNEQFRLQNTTIGLTV

SEQ ID NO: 69 - DNA, 200 bp, Artificial Sequence; identical to SEQ ID NO: 6
  source: /note="Description of Artificial Sequence: Synthetic polynucleotide"

SEQ ID NO: 70 - protein, 5 aa, Artificial Sequence
  source: /note="Description of Artificial Sequence: Synthetic peptide"
RKDVL

SEQ ID NO: 71 - protein, 30 aa, Artificial Sequence; identical to SEQ ID NO: 44
  source: /note="Description of Artificial Sequence: Synthetic polypeptide"

SEQ ID NO: 72 - DNA, 200 bp, Artificial Sequence; identical to SEQ ID NO: 7
  source: /note="Description of Artificial Sequence: Synthetic polynucleotide"

SEQ ID NO: 73 - protein, 6 aa, Artificial Sequence
  source: /note="Description of Artificial Sequence: Synthetic peptide"
RKDVLV

SEQ ID NO: 74 - protein, 30 aa, Artificial Sequence; identical to SEQ ID NO: 44
  source: /note="Description of Artificial Sequence: Synthetic polypeptide"

SEQ ID NO: 75 - DNA, 200 bp, Artificial Sequence; identical to SEQ ID NO: 8
  source: /note="Description of Artificial Sequence: Synthetic polynucleotide"

SEQ ID NO: 76 - protein, 5 aa, Artificial Sequence
  source: /note="Description of Artificial Sequence: Synthetic peptide"
RKDVL

SEQ ID NO: 77 - protein, 30 aa, Artificial Sequence; identical to SEQ ID NO: 50
  source: /note="Description of Artificial Sequence: Synthetic polypeptide"

SEQ ID NO: 78 - DNA, 7380 bp, Homo sapiens
gaaagtccctgactggagttggcagccaagccaggccctggagtgggcacccagagggaagacaggttggctaatttcctggagcccctaagggtgcaagggtaggccttctgtgtctgagggaggagggctggggctctggactcctgggtctgagggaggaggggtggggggcctggactcctgggtctgagggaggagggtctgggcctgtactcctggatctgagggaggaggggctggggaacttgggctcctgggtctgagggaggagggagctttggtctggactcctgggtctgagggagtaggggctagggatctggactcgtgggtgtgaggaaggaggggctggggtcctggactcctgggtctgaggaaggaggggcagggggcttggactcctgggtctgaggaaggaggggccgggagcctggactcctaagtctgagggaggagggtctgggggcctggactgctgggtgtgagcagaagggtctgggtgctgggagtcccgagcctggggagatgatggttaaacttctgggaatcaagtcaaactcctgagtctttgacattgatgtatcttgaatgggagggtcagtctgtggggaaggattacccaggtgccgaggcaagagactgaaggcacaaactgtttcagtataataaagaaaatagttagaataagaatagttatcatacaaattagatatagagatgatcatggacagtatcaatcattagtgtaaacattattaatcattagctattacttttattctttgttgtataactaatataaccaggaaacaaccggtgggtatagggtcaggtactgaagggacattgtgagaagtgacctagaaggcaagaggtgagccttctgtcacaccggcataagggcctcttgagggctccttggtcaagcgggaacgccagtgtctgggaaggcacccgttactcagcagaccacgaaagggaatctccttttcttggaggagtcagggaacactctgctccaccagcttcttgtgggaggctgggtattatctaggcctgcccgcagtcatcctgctgtgctgtgcttcaatggtcacgctccttgtcctcttgcattttcctcccgtactcctggttcctctttgaagttcgtagtagatagcggtagaagaaatagtgaaagcctttttttttttttttttgaggcggagtctcgctctgtcccccaggctggagtgcagtggcgtgatctcggctcactgcaatctccgcctcctgggttcacaccattctcctgcctcaccctcccaaatagctaggactacaggcgccctccaccacgcgcccggataattttttgtatttttagtagagacagggtttcaccgtgttagccaggatggcctccacctcctgaccttgtgatccgcccgcctcagcctcccaaagtgctgggattacaggcgtgagccaccgcgcccgcccgaaatagtgaaagtcttaaagtctttgatctttcttataagtgcagagaagaaaacgctgacatatgctgccttctctttctgcttcggctgcctaaaagggaagggccccctgtcccatgatcacgtgacttgcttgaccttatcagtcatttggacgactcaccctccttatcctgcccccccttgtcttgtatacaataaatatcagcgcgcccagccattcggggccactaccggtctctgcgtcttgatggtagtggtcccccgggcccagctgttttctctttatctctttgtcttgtgtctttatttcttacaatctctcctctcctcacaggggaagaacacccacccgcaaagccccgtagggctggaccctacgttagcctgccctgctcggggttggcgatgctggaggtgggccttggaccagagaaaatgctttaattaggtgacaagcgggcagaggcctttgtctctggcgccggcagccacggcccccgctgacggcgtgggaaacagaccctgttccactccggtctccagccttggaatggttgccttcgtgcagtgcaggtctggaaagtagcagtttggcacgggaccctagaattccccaaaaggagtgactaggggctgggattctggaatttgagtgtggacggtgaggcggggggtgtgggagatcggagaccctggtgggcgcgggagcacctgcaggctggaggccctcgcgcgctccggcggcagcctggcaaacaggttctccatcccccaggaggacgcggcagagggcggacgatcgctccactcgccgggaccaggtgcgggggccctgcccagccgctggggcgtggccaggctcgaagcacccaggtgtcgggggccgactctaagccctggcaccggaagagagagggcggcggattggacctcccggctccagcattgcaactgggcgctccgtctcctggtccacgcaatgatgctgcggctgctcagaagccaggtagcctgccctgggtgaagccttcgcgcaggtcaatgacggggcggaggggcagggcgcggtcccctgcatccccgatctggggagcggtgggcccaggggccatcgccttagcccctggcgctggggctcggcgccaagtgacgggcggggctccaccttccagccatccgcccggcccgggagggcggacgctgcgagactcccggccgcgccctctccttcctctcctccccaagccctcgctgccagtccggacaggctgcgcggaggggagggctgccgggccggatagccggacgcctggcgttccaggggcggccggatgtggcctgcctttgcggagggtgcgctccggccacgaaaagcggactgtggatctgccacctgcaagcagctcgggtaagtggggactgccccactcagttgttcctgggacccaggaacaactccttcagaaccaggaggtgcacccccaacctcttctccaggtcttcctaaggccctaggaatctccgccacctccccagccattactcctccaggaaccaagatgctccttccgctcctgaccctccagcctctcttgttttacttgaactatcgtttcccatcaccacctctgtggtggattttgcgcctcacagacaggtactcctgagaaacaggctggtggaagagtccagtatcagcggaacttacaggaggggagactcgagattccttcaggaaaggtgtaggaacctggaccactttctttttttttttttttttttttttttaagacagggtccctctctgtcgcgcaagctggagtgcagtcagcggtgctatcgcggctcattgtgagctccggggatcctcccgccttagcatccggtgtagctgagaccacagacatgtgccaccatgccaagctaattttatttatttttttttggagacggagtttcactcttgttgcccaggctggagtgtaatggcatgatctcagctcaccgcaactcccgccccccgggttcaggcgattctcctgcctcagcctcccgagtggctgggattacaggcatgcgccaccatgcccggctaattttgtattttaagtagagacagggtttctccacgttggtcaggctggtctcgaactcccaacctcaggtgatccacccaccttggcctcccaaagtgctggggttacaggtgtgagccaccgcgcctggcccatgccaagctaattttaaaatttttttgtaagagtgctctgttgcccaggctgatcttgaactcctgggctcaagggatcctcccatctcagcctcccaatatgctgggattacaggtgtgagccacagtgcccagccaaaccatggctatcttgaaaaccacttgtcttccagtccccatgccccgaaattccaaggctctcatccctgaaacctaggactcaggctctccctacctcagccccaggagtctaaacctttaacttcctctttccctgggactaaggagtgctgcaccccaggcgcctcccttaccccacatccctcctcagcctcccctcctcagcctcagagcatttgctaattcgcctttcctcccctgcagccatgtggctccggagccatcgtcagctctgcctggccttcctgctagtctgtgtcctctctgtaatcttcttcctccatatccatcaagacagctttccacatggcctaggcctgtcgatcctgtgtccagaccgccgcctggtgacacccccagtggccatcttctgcctgccgggtactgcgatgggccccaacgcctcctcttcctgtccccagcaccctgcttccctctccggcacctggactgtctaccccaatggccggtttggtaatcagatgggacagtatgccacgctgctggctctggcccagctcaacggccgccgggcctttatcctgcctgccatgcatgccgccctggccccggtattccgcatcaccctgcccgtgctggccccagaagtggacagccgcacgccgtggcgggagctgcagcttcacgactggatgtcggaggagtacgcggacttgagagatcctttcctgaagctctctggcttcccctgctcttggactttcttccaccatctccgggaacagatccgcagagagttcaccctgcacgaccaccttcgggaagaggcgcagagtgtgctgggtcagctccgcctgggccgcacaggggaccgcccgcgcacctttgtcggcgtccacgtgcgccgtggggactatctgcaggttatgcctcagcgctggaagggtgtggtgggcgacagcgcctacctccggcaggccatggactggttccgggcacggcacgaagcccccgttttcgtggtcaccagcaacggcatggagtggtgtaaagaaaacatcgacacctcccagggcgatgtgacgtttgctggcgatggacaggaggctacaccgtggaaagactttgccctgctcacacagtgcaaccacaccattatgaccattggcaccttcggcttctgggctgcctacctggctggcggagacactgtctacctggccaacttcaccctgccagactctgagttcctgaagatctttaagccggaggcggccttcctgcccgagtgggtgggcattaatgcagacttgtctccactctggacattggctaagccttgagagccagggagactttctgaagtagcctgatctttctagagccagcagtacgtggcttcagaggcctggcatcttctggagaagcttgtggtgttcctgaagcaaatgggtgcccgtatccagagtgattctagttgggagagttggagagaagggggacgtttctggaactgtctgaatattctagaactagcaaaacatcttttcctgatggctggcaggcagttctagaagccacagtgcccacctgctcttcccagcccatatctacagtacttccagatggctgcccccaggaatggggaactctccctctggtctactctagaagaggggttacttctcccctgggtcctccaaagactgaaggagcatatgattgctccagagcaagcattcaccaagtccccttctgtgtttctggagtgattctagagggagacttgttctagagaggaccaggtttgatgcctgtgaagaaccctgcagggcccttatggacaggatggggttctggaaatccagataactaaggtgaagaatctttttagttttttttttttttttttggagacagggtctcgctctgttgcccaggctggagtgcagtggcgtgatcttggctcactgcaacttccgcctcctgtgttcaagcgattctcctgtctcagcctcctgagtagatgggactacaggcacaggccattatgcctggctaatttttgtatttttagtagagacagggtttcaccatgttggccaggatggtctcgatctcctgaccttgtcatccacctgtcttggcctcccaaagtgctgggattactggcatgagccactgtgcccagcccggatattttttttttaattatttatttatttatttatttattgagacggagtcttgctctgtagcccaggccagagtgcagtggcgcgatctcagctcactgcaagctctgcctcccgggttcatgccattctgcctcagcctcctgagtagctgggactacaggcgcccgccaccacgcccggctaattttttttgtatttttagtagagacggggtttcatcgtgttaaccaggatggtctcgatctcctgacctcgtgatctgcccacctcggcctcccacagtgctgggattaccggcgtgagccaccatgcctggcccggataattttttttaatttttgtagagacgaggtcttgtgatattgcccaggctgttcttcaactcctgggctcaagcagtcctcccaccttggcctcccagaatgctgggtttatagatgtgagccagcacaccgggccaagtgaagaatctaatgaatgtgcaacctaattgtagcatctaatgaatgttccaccattgctggaaaaattgagatggaaaacaaaccatctctagttggccagcgtcttgctctgttcacagtctctggaaaagctggggtagttggtgagcagagcgggactctgtccaacaagccccacagcccctcaaagacttttttttgtttgttttgagcagacaggctaaaatgtgaacgtggggtgagggatcactgccaaaatggtacagcttctggagcagaactttccagggatccagggacacttttttttaaagctcataaactgccaagagctccatatattgggtgtgagttcaggttgcctctcacaatgaaggaagttggtctttgtctgcaggtgggctgctgagggtctgggatctgttttctggaagtgtgcaggtataaacacaccctctgtgcttgtgacaaactggcaggtaccgtgctcattgctaaccactgtctgtccctgaactcccagaaccactacatctggctttgggcaggtctgagataaaacgatctaaaggtaggcagaccctggacccagcctcagatccaggcaggagcacgaggtctggccaaggtggacggggttgtcgagatctcaggagccccttgctgttttttggagggtgaaagaagaaaccttaaacatagtcagctctgatcacatcccctgtctactcatccagaccccatgcctgtaggcttatcagggagttacagttacaattgttacagtactgttcccaactcagctgccacgggtgagagagcaggaggtatgaattaaaagtctacagcactaa

SEQ ID NO: 79 - DNA, 7380 bp, Homo sapiens
ttagtgctgtagacttttaattcatacctcctgctctctcacccgtggcagctgagttgggaacagtactgtaacaattgtaactgtaactccctgataagcctacaggcatggggtctggatgagtagacaggggatgtgatcagagctgactatgtttaaggtttcttctttcaccctccaaaaaacagcaaggggctcctgagatctcgacaaccccgtccaccttggccagacctcgtgctcctgcctggatctgaggctgggtccagggtctgcctacctttagatcgttttatctcagacctgcccaaagccagatgtagtggttctgggagttcagggacagacagtggttagcaatgagcacggtacctgccagtttgtcacaagcacagagggtgtgtttatacctgcacacttccagaaaacagatcccagaccctcagcagcccacctgcagacaaagaccaacttccttcattgtgagaggcaacctgaactcacacccaatatatggagctcttggcagtttatgagctttaaaaaaaagtgtccctggatccctggaaagttctgctccagaagctgtaccattttggcagtgatccctcaccccacgttcacattttagcctgtctgctcaaaacaaacaaaaaaaagtctttgaggggctgtggggcttgttggacagagtcccgctctgctcaccaactaccccagcttttccagagactgtgaacagagcaagacgctggccaactagagatggtttgttttccatctcaatttttccagcaatggtggaacattcattagatgctacaattaggttgcacattcattagattcttcacttggcccggtgtgctggctcacatctataaacccagcattctgggaggccaaggtgggaggactgcttgagcccaggagttgaagaacagcctgggcaatatcacaagacctcgtctctacaaaaattaaaaaaaattatccgggccaggcatggtggctcacgccggtaatcccagcactgtgggaggccgaggtgggcagatcacgaggtcaggagatcgagaccatcctggttaacacgatgaaaccccgtctctactaaaaatacaaaaaaaattagccgggcgtggtggcgggcgcctgtagtcccagctactcaggaggctgaggcagaatggcatgaacccgggaggcagagcttgcagtgagctgagatcgcgccactgcactctggcctgggctacagagcaagactccgtctcaataaataaataaataaataaataattaaaaaaaaaatatccgggctgggcacagtggctcatgccagtaatcccagcactttgggaggccaagacaggtggatgacaaggtcaggagatcgagaccatcctggccaacatggtgaaaccctgtctctactaaaaatacaaaaattagccaggcataatggcctgtgcctgtagtcccatctactcaggaggctgagacaggagaatcgcttgaacacaggaggcggaagttgcagtgagccaagatcacgccactgcactccagcctgggcaacagagcgagaccctgtctccaaaaaaaaaaaaaaaaaactaaaaagattcttcaccttagttatctggatttccagaaccccatcctgtccataagggccctgcagggttcttcacaggcatcaaacctggtcctctctagaacaagtctccctctagaatcactccagaaacacagaaggggacttggtgaatgcttgctctggagcaatcatatgctccttcagtctttggaggacccaggggagaagtaacccctcttctagagtagaccagagggagagttccccattcctgggggcagccatctggaagtactgtagatatgggctgggaagagcaggtgggcactgtggcttctagaactgcctgccagccatcaggaaaagatgttttgctagttctagaatattcagacagttccagaaacgtcccccttctctccaactctcccaactagaatcactctggatacgggcacccatttgcttcaggaacaccacaagcttctccagaagatgccaggcctctgaagccacgtactgctggctctagaaagatcaggctacttcagaaagtctccctggctctcaaggcttagccaatgtccagagtggagacaagtctgcattaatgcccacccactcgggcaggaaggccgcctccggcttaaagatcttcaggaactcagagtctggcagggtgaagttggccaggtagacagtgtctccgccagccaggtaggcagcccagaagccgaaggtgccaatggtcataatggtgtggttgcactgtgtgagcagggcaaagtctttccacggtgtagcctcctgtccatcgccagcaaacgtcacatcgccctgggaggtgtcgatgttttctttacaccactccatgccgttgctggtgaccacgaaaacgggggcttcgtgccgtgcccggaaccagtccatggcctgccggaggtaggcgctgtcgcccaccacacccttccagcgctgaggcataacctgcagatagtccccacggcgcacgtggacgccgacaaaggtgcgcgggcggtcccctgtgcggcccaggcggagctgacccagcacactctgcgcctcttcccgaaggtggtcgtgcagggtgaactctctgcggatctgttcccggagatggtggaagaaagtccaagagcaggggaagccagagagcttcaggaaaggatctctcaagtccgcgtactcctccgacatccagtcgtgaagctgcagctcccgccacggcgtgcggctgtccacttctggggccagcacgggcagggtgatgcggaataccggggccagggcggcatgcatggcaggcaggataaaggcccggcggccgttgagctgggccagagccagcagcgtggcatactgtcccatctgattaccaaaccggccattggggtagacagtccaggtgccggagagggaagcagggtgctggggacaggaagaggaggcgttggggcccatcgcagtacccggcaggcagaagatggccactgggggtgtcaccaggcggcggtctggacacaggatcgacaggcctaggccatgtggaaagctgtcttgatggatatggaggaagaagattacagagaggacacagactagcaggaaggccaggcagagctgacgatggctccggagccacatggctgcaggggaggaaaggcgaattagcaaatgctctgaggctgaggaggggaggctgaggagggatgtggggtaagggaggcgcctggggtgcagcactccttagtcccagggaaagaggaagttaaaggtttagactcctggggctgaggtagggagagcctgagtcctaggtttcagggatgagagccttggaatttcggggcatggggactggaagacaagtggttttcaagatagccatggtttggctgggcactgtggctcacacctgtaatcccagcatattgggaggctgagatgggaggatcccttgagcccaggagttcaagatcagcctgggcaacagagcactcttacaaaaaaattttaaaattagcttggcatgggccaggcgcggtggctcacacctgtaaccccagcactttgggaggccaaggtgggtggatcacctgaggttgggagttcgagaccagcctgaccaacgtggagaaaccctgtctctacttaaaatacaaaattagccgggcatggtggcgcatgcctgtaatcccagccactcgggaggctgaggcaggagaatcgcctgaacccggggggcgggagttgcggtgagctgagatcatgccattacactccagcctgggcaacaagagtgaaactccgtctccaaaaaaaaataaataaaattagcttggcatggtggcacatgtctgtggtctcagctacaccggatgctaaggcgggaggatccccggagctcacaatgagccgcgatagcaccgctgactgcactccagcttgcgcgacagagagggaccctgtcttaaaaaaaaaaaaaaaaaaaaaaaaagaaagtggtccaggttcctacacctttcctgaaggaatctcgagtctcccctcctgtaagttccgctgatactggactcttccaccagcctgtttctcaggagtacctgtctgtgaggcgcaaaatccaccacagaggtggtgatgggaaacgatagttcaagtaaaacaagagaggctggagggtcaggagcggaaggagcatcttggttcctggaggagtaatggctggggaggtggcggagattcctagggccttaggaagacctggagaagaggttgggggtgcacctcctggttctgaaggagttgttcctgggtcccaggaacaactgagtggggcagtccccacttacccgagctgcttgcaggtggcagatccacagtccgcttttcgtggccggagcgcaccctccgcaaaggcaggccacatccggccgcccctggaacgccaggcgtccggctatccggcccggcagccctcccctccgcgcagcctgtccggactggcagcgagggcttggggaggagaggaaggagagggcgcggccgggagtctcgcagcgtccgccctcccgggccgggcggatggctggaaggtggagccccgcccgtcacttggcgccgagccccagcgccaggggctaaggcgatggcccctgggcccaccgctccccagatcggggatgcaggggaccgcgccctgcccctccgccccgtcattgacctgcgcgaaggcttcacccagggcaggctacctggcttctgagcagccgcagcatcattgcgtggaccaggagacggagcgcccagttgcaatgctggagccgggaggtccaatccgccgccctctctcttccggtgccagggcttagagtcggcccccgacacctgggtgcttcgagcctggccacgccccagcggctgggcagggcccccgcacctggtcccggcgagtggagcgatcgtccgccctctgccgcgtcctcctgggggatggagaacctgtttgccaggctgccgccggagcgcgcgagggcctccagcctgcaggtgctcccgcgcccaccagggtctccgatctcccacaccccccgcctcaccgtccacactcaaattccagaatcccagcccctagtcactccttttggggaattctagggtcccgtgccaaactgctactttccagacctgcactgcacgaaggcaaccattccaaggctggagaccggagtggaacagggtctgtttcccacgccgtcagcgggggccgtggctgccggcgccagagacaaaggcctctgcccgcttgtcacctaattaaagcattttctctggtccaaggcccacctccagcatcgccaaccccgagcagggcaggctaacgtagggtccagccctacggggctttgcgggtgggtgttcttcccctgtgaggagaggagagattgtaagaaataaagacacaagacaaagagataaagagaaaacagctgggcccgggggaccactaccatcaagacgcagagaccggtagtggccccgaatggctgggcgcgctgatatttattgtatacaagacaagggggggcaggataaggagggtgagtcgtccaaatgactgataaggtcaagcaagtcacgtgatcatgggacagggggcccttcccttttaggcagccgaagcagaaagagaaggcagcatatgtcagcgttttcttctctgcacttataagaaagatcaaagactttaagactttcactatttcgggcgggcgcggtggctcacgcctgtaatcccagcactttgggaggctgaggcgggcggatcacaaggtcaggaggtggaggccatcctggctaacacggtgaaaccctgtctctactaaaaatacaaaaaattatccgggcgcgtggtggagggcgcctgtagtcctagctatttgggagggtgaggcaggagaatggtgtgaacccaggaggcggagattgcagtgagccgagatcacgccactgcactccagcctgggggacagagcgagactccgcctcaaaaaaaaaaaaaaaaaggctttcactatttcttctaccgctatctactacgaacttcaaagaggaaccaggagtacgggaggaaaatgcaagaggacaaggagcgtgaccattgaagcacagcacagcaggatgactgcgggcaggcctagataatacccagcctcccacaagaagctggtggagcagagtgttccctgactcctccaagaaaaggagattccctttcgtggtctgctgagtaacgggtgccttcccagacactggcgttcccgcttgaccaaggagccctcaagaggcccttatgccggtgtgacagaaggctcacctcttgccttctaggtcacttctcacaatgtcccttcagtacctgaccctatacccaccggttgtttcctggttatattagttatacaacaaagaataaaagtaatagctaatgattaataatgtttacactaatgattgatactgtccatgatcatctctatatctaatttgtatgataactattcttattctaactattttctttattatactgaaacagtttgtgccttcagtctcttgcctcggcacctgggtaatccttccccacagactgaccctcccattcaagatacatcaatgtcaaagactcaggagtttgacttgattcccagaagtttaaccatcatctccccaggctcgggactcccagcacccagacccttctgctcacacccagcagtccaggcccccagaccctcctccctcagacttaggagtccaggctcccggcccctccttcctcagacccaggagtccaagccccctgcccctccttcctcagacccaggagtccaggaccccagcccctccttcctcacacccacgagtccagatccctagcccctactccctcagacccaggagtccagaccaaagctccctcctccctcagacccaggagcccaagttccccagcccctcctccctcagatccaggagtacaggcccagaccctcctccctcagacccaggagtccaggccccccacccctcctccctcagacccaggagtccagagccccagccctcctccctcagacacagaaggcctacccttgcacccttaggggctccaggaaattagccaacctgtcttccctctgggtgcccactccagggcctggcttggctgccaactccagtcagggactttc

SEQ ID NO: 80 - protein, 365 aa, Homo sapiens
MWLRSHRQLCLAFLLVCVLSVIFFLHIHQDSFPHGLGLSILCPDRRLVTPPVAIFCLPGTAMGPNASSSCPQHPASLSGTWTVYPNGRFGNQMGQYATLLALAQLNGRRAFILPAMHAALAPVFRITLPVLAPEVDSRTPWRELQLHDWMSEEYADLRDPFLKLSGFPCSWTFFHHLREQIRREFTLHDHLREEAQSVLGQLRLGRTGDRPRTFVGVHVRRGDYLQVMPQRWKGVVGDSAYLRQAMDWFRARHEAPVFVVTSNGMEWCKENIDTSQGDVTFAGDGQEATPWKDFALLTQCNHTIMTIGTFGFWAAYLAGGDTVYLANFTLPDSEFLKIFKPEAAFLPEWVGINADLSPLWTLAKP

SEQ ID NO: 81 - DNA, 20 bp, Homo sapiens
ggtctggacacaggatcgac

SEQ ID NO: 82 - DNA, 20 bp, Homo sapiens
gattaccaaaccggccattg

SEQ ID NO: 83 - DNA, 58053 bp, Homo sapiens
aactccatagagaggccagcacaaccagccttgcagcctgagataaggcctttggcgggtgtctcccctatcgctccctcaagccctcaagtaggtgttggagagaggggtgatgcctggtgctggtggaacccctgcacagagacggacacaggatgagctctaagtacccgcggtctgtccggcgctgcctgcccctctgggccctaacactggaagcagctctcattctcctcttctatttttttacccactatgacgcttccttagaggatcaaaaggggctcgtggcatcctatcaaggtgagagttcattggaaaagtggtcacaggagcaaatagcaggggcaggggcgggggaggcctgtggttctccaggggcacagatgttcctttctacaaaatcccaaggaaaaagattcccccatcttcttccgtagattgcaccgaaattcagccaacaatgtaagctttcctttagaagcagcctgggcatgccctcttctgtgaagcctgccttgatttttcagcacagtgagaggcatcctctttggtgttcctcaaattccctctaccaaatggtcttcataattctctgcttctctgcttccccttctctctcctcagtggcaaggaatttttttatttttatagatttaggggatacaagtgcagctatcttatgcaagcaatttcatgttgttgggtttttggtttttgtttcctttttgtggcctctcgctcatttcttatttctttttgaggcagggtctcactctgttgcccaggctgaagtgcagtggcatgatcatggttcactgcagccttgacctcctagtctcaagcaatcttcccacctcagcctcccaagaagctgggaccacaggagggcaccaccatgcctggctaattttttttttttttttttttggtagagatgtgggtctccctgtgtttcccagactggtctcaaactcctggacacaagcgatcctccagcctcagtctcccaaagtgctggaattacaggcgtgaagcactgtgcccagctctcttgctcatatctatactagttttcttttggaagcttcagcctgttgctaccccccacccccacccccaccgaccccagctttcttctcacttaggggctgggaagtctgcatgctgtctataaatccagaaccagaaggtatggctgaaggggagggtaggatgatggttattttatattcagctaaaaatattcccagactgtgatgagacaactgtaaataagacagatgtccacaatggtgtgactttgcttttttaaaaatattgaaatgagtttcaggcatctcagtgggctgataggttgttgataatagacagggcctccttgaagaatgtccctgagacaaagttgaagcttgagcctggttgagtccttgcttgttcctaggttgatatgaacggctagttaactggaagcaaagagaagtcatcctgggggccatggcagtgacaagtaggacttagggagggaagcccttataccatttaaggtgctggcccagagaggagccttcagtgacagacaaacaagagctggcacaattttaattcacttcaatttactctaattcatttcaatccaatacaattcaatgcattccattcattcaaccatgtatgacatccaatgtgggatccagactcatgatgattagagctgatatttatgagcacttactatgtaccaggcactattctacatgctttacattgaaccctcacaataacccaatgaggtgggtactattatgatcttcgtttttcatatgaggaaactaggcatatggatgttgagtaatttgcccacggtcgctcagctagcaatagcacagcgtatttaaatttagccaccctggatttagtttccttacacttaaccattatgcatcatggccccattttacagtgggcttgagtctttgtcatataacccagtaggttagcagccactattccaaccctgtagattgactctagggtccatgttctttacccctgcaccgtgctactaacgtaggtacaaaatgtcctcagaaactcactttatacggaagctcagaggagggtccacaacccaggcaggggagacgatggtgtcaggggagggaggtgactgcccagccaggtcttgaaggctcagtaggaattacctgtgggacaaaggagggtcatccaagtgagggcacagtgggtgccatggcgtgcacacacaatagagcagactgagcctgggcttaacattgcattgccctggagcctaaaaggggaaacaaagggccgggcgacgtggctcacgcctgtaatcccggcacattgggaggccaaggctggagaatcacctgaggttaggagttcgagaccagcctggccaacatggcaaaaccgcatctctactaaaattataaaaactggctgggtgtggtggcacacgtctataatccgagctacttgggaggccattacactccagcctgggcgccagagtgagacttcatctcaaaaaaccaaacaacaaaaacaacaacaagaacaacaaaaaaacaaagaggagagcagggactgggtgtggtgactcatgcctgtaatcccaaacactttgggagaccaaggcaggcagatcacctgaggtcaggagttcgagaccagcctggccaacatggtaaaaccctgtctctactaaaaatacaaaaattagccggatgtggtggcacgtgcctgtagtcccagctgcttgggaagctgagggaggagaattgcttgaacccaggaggcagaggttgctgagctgagaacatgccactgcactccaccctgggtgacagagtgggactctgtctgaaaaaaataatagtaataaataaaaataaagagggaagcagcgggtggcagactcactgggctgcatacgaagtttggcttcagtctgaggtccgaatagtaaacagcagcgagacaagtttgggtttgggtcatggaggaagccatgccagggctggtgttgggcacagggaaaggggcatggcttgagacaccagaccagcgtggaggctgtagtgtagtattgacctgaggacttcaacattctgatggtgtacacacgattttttgagcatgtaccatggttatatattacactttaagtattactttaagtattactacattaatatattttgtatgttacaataaatacatacaaattaggaaaattgaaagagatcaaaatgaaatatataatattttcaaattactaatcataatggtgtcaatctccaggcagggtccattgctacagttgacgatagtggatgaaaattcactcctcagagtcttcttgataatttgaaattgtcttgattgacttgtcagatctgattagatcaacatgttttaaatctcgaatgtgactgacagcttgtacgaggagaagtttcactctgccttttcccttttgttcacttgactgccattatttctatgcttccaatctgtgtttttctgcacgagttggttaagccattacttcattttgtgaaagtttgttgagttaaacttaggtaacttaatctgtcaatccacttaattgaattcagtcctggtaaactataatagattattcaaacctgccaattctaaaaagacattttgagacaatcaggaaatctgaatatagcatgaatatcttacgatatacaaggattattgttaattttgttaggtatgataaaagcatggtgggttgtttttgtttttgttttttaagtctccatctgttagagaggcacattgaaatggcatgatatctggggtttgcttttatgccagaaaaaagaaaaagtacagaaggattatagaaacaagattggtctcatgtgacaatcatcagagtttggagatgggcacgtagggtcatcgtgctgttctctctgttttcgtatatgctttaaaagttctgtaatagttaattaaaaaaaaaaaaaaacaccctggctgagcatttagggaggccaagtggggaggatcgcttaaaccaaggagttcaagacgagcctaggaaacatagggagacccccccccatctctaaaaaaaaaaaaaaaaaaaaaaactttaaaatttaacccagtgtggtggcacatgcctatagtcccagctactcagtaggctgaggtgagaggcttgcttgagcctgggagcttgaggctgcagtgggacgggattgtaccacttcactccagcatgggcgacagagcaagaccctgtctcaaaaaaaataaaaatatttgaggtgaagcgaggctgtaataacaaatttaaaaatataaataaaacataaaggctgggtgtagtggctcacgcctgtaatcccagcactttgggaggccaaagcaggcagatcacgaggtctggagatggagaccatcctggctaacacgatgaaaccccatctctaccaaaaatacaaaaaaattagccgggtgtggtggcgggtgcctgtagtcccagctacttgggaggctgaggcaggagaatggcgtgaacccaggaggcggagctttcagtgagctgagattacgccactgcactccagcctgggcaacagagcgagactccgtctaaaaaaaaatgaaaataaaaataaatgaaacataaaaccctgccattagttgcaatatgaagaatatagagaaatgcatatcaaatccttctcattggaccaatattcccttagggcaccttccaaagctaggagactcaaggctgtatgacatcctgagcaagtgaggggtggcttctgggtgaatctgaatattaaatatttgcagaattgaaaacttcacaaagtacctttagagatagaatagcctagatccatgtttctcaaagtgtggtccccagacctgctgcctcagcatctcctggaaatttagtagaaatgcagattctcaggccctaggccagacctactgatcagaagctctgggcctggggcccagcagtctgtgttttcacaagccctcttggtgattcttctgtgcatgaaagttcgagaattcctggagctagactgattcaaatcttgcctctgtatcttagagaccttgggcagattagtcaacctctttctgcctctgtttctacttctgtcagaggatgatagtacttgtttcattaagttgttgaaaggataaatgaattgacacacataaagagtattagcttttattatcaaaagctttttttttgagacagagttttgctcttattgcccaggggagtgcagtggtgcgatcttggctcaccgcaacctccacctcccaggttcaagtaattctcctgcctcagcctcccgagtagctgggattacaggcatgcgccaccacgcccggctaattttgtatttttagtagagatggggtttctccatgttggtgaggctggtctcgaactcccaacctcaggtgatgcacccgccttggcctcccaaagtgctgggattacaggcgtgagccaccgcgcctggcccaaaagctttaatttcttaattttttaaataaaataaataaaactagaattgcttgttttcttccagctaccctggtgattgtattgagcattttctggggtgtgtgttctttgctgtaatgactactggtctggatgacctgtgatgagaccagatgggcaggggcagtggaggagattctagagatatttaggagataagtcagctgtacttgatgaaaagagtggggagttaaggctggctgcagatgtatgatttggcatagagaggtgccagttcctgagatgagagacagaaggggagggacaggttgtgaggatgaatgaacaatgatatgttcattctgggcttggagttaaggggcctatgatatgcttaggggaagcagagagtatcaattacctattgctgcataacagccaccccaaacttagtggcttaaaatagtaaccttttaatttactcatgatcatgattctgtggtgcaacaactgggctgggttcagctgggcagttcttctgttagtttcacccagggtcattcatgcatctgcagtttggggtgggatggcctcagatgacctcattcacgtgtttggcagttggtgattcactgggggccattactgtaacaatcgcctaccaggcagagcttccctaaggcttccaaactaggagactatcctgggtcctgtgctgtggataccactcagtcccccatccccaccccatattcctcaaaggcagagagaggggctactagaagacagaggagttttcccagtgacatgtaaacactccaaaccctggcaccttccacactgcagctttggtctgcccctttgggaaatctctgtttttcttcccaggctgctggaggggtgagagtcgccggtagagtagaggctgtgggcgaggaggtggcggcctcctgaggctgcagtggtctttccaggcagcagtgggagcacagggtggaggtcaaccctagagcctgggagagtgaagctgggtgtgacttcagagctgttggtgctgaagtttctgcaggccagaaggaggggcaagagtgggagggggcgcagatccagaatcacggaggcagctgaccggaggaggcagctgcccaaggggatggactcagaaggccaaagtgctgttatccaaacgaactctttgcaagtggtctctttgcaacaggcctgggggagagcagtcttgcctaaagtcacaccgctaatcagcggccggcacggggtaacagttactaacactcactacgtacccaatgctgggcgaagtgacttgcatgagccagcgagctcaatgctcatggcaatcctctgagcagctggcattgtttcatctcaattttacagctcaggaagctgggacacagaggaagagccaggctctgaacactgacaacctgattgagagacccacactgttcatcaccgttacgctatatatgctgtatagaaaggcaggatggcataatggttaaacctaggtaggtagggtttgaatcctcctgctaccatttactagctctgtgacttggactagttatagcacctctctgtgcctccctttccccatctctaaaatggggataataaatcgtacctcctacctgaggctgttgtgggctaagtctgtaaggcacgtagaacagtgcctggaacgtggggtactgtctatctgtgtgcctgctgttacaacaatggtgagtattgccttatctctcgctgctgaactaccaggttagacttctttctgcaagtcatgaggctttcataaacttttcctgaaggctttccgtagaatgtacaattcccctctgggtccaggcatgggcgcccgggtagcacatccacttcttatcacccctgaacaccttagagcccatcagcttatcaaaccagcagctgatgtgagtgcagagcagactgtgagaggtggaggctgataccagtgaggatgctccaagctgggacccagccctgaagcgggagcccagataatggatgggtggaaatgggcctggagcccaggagaagtgggaggatgagggggcagggggaggagaagcctgaaatcaaatgttatttcctgaccagtttggggtgcatgagctctgtcaacagctcatggaaactgctgccctaatttcatcttgttggctgaggcacaattcctctctcagggacagtgtagagccttggggaggaaggccctgagcgcgtatacctggaatcagggaatcgggatcaggggcagcagctgtgcccaataaagcccccacccaggatcctctgacttcctcatctctttttttttttttttgagctgcagtctcactctgtcatccaggctggagtacagtggtgcgatctcggctcactgcaacctcagccttctgggttcaagcgattctcctgcctcagcctcctgagtagctgggattacaggcatgcgccaccatgccaggctaatttttgtatttttagtagagacggggtttcaccatgttggccaggctggtctcaaactcctgacttcaagtgatctgcccacctcagcctcccaaagtgctaggattacagacataagccactgtgcctggccttttttttttttttttttttgtaaacagggtctccctctgtcacccaggctgctggagtgtagtggtgtgaccgcagctcactgcagccttaaccttctaggcacaagccatcctcctacctcaccctcctgagtagctgggactacaggcactcgccaccacgcccaagtaattttgtattttttgtagagacaaggtcttgctatgttgcctaggctggtcttgaactcctcagctcaagcaatcctccctccttggcctcccaaagtgctgggattgtgctgggattacaggtgtgagccaccatacctggtctgacttcctaatctttagggccccaactctgcccttatccaggcaactctcctctccccatcttccactaacttctttggaatattccagagctgtaaaagccttagagagtatcaagtccaactcctatgtgttacagacagggaaactgaggcctaaagagggtaatggacttgcctaagatcacttagtgaggtgagagaagaaagagctagagacagcctagcctgtgcaaggacatagttccaggcattcagagctgggctctgctgccggcatgtttggggcctggtagttagttcactgctgaactaccaggttagattttctttctccaagttgtggagctttcataaacttttcctgaaggtcttccttacaatgtacaattctcctctgggcccggtcatgagcgcccctcacaggctctctctggtccccttctgtaaaatgagaggaaaatggaagaattgctctactcatggaatcttcaataagtctgggccctatgcatatagcattgctacaaaatggcagatgcactttaacaatcgtgtttaataaaaggttggatttgcatatctgaagtggggcatgcagtctccaactgaacacaagcctcactgctcccgcatgtgcactgcaccttcatatacatatttcctgcttggctcctgagggaatttgagtaatcccaagaggaacccctgtagaaaatgtcccctggccacacacccccattcctaaggatgcaagcaggagatagaaacattccctgcacctccctccttgttgtcagaagaagtgcaaagagttgaatccttcctaatgcccacttctcacccacgccccaaatccccaggtcccatggaggtccttgggggcctcctatatcctggtggtgtcaggttgatttggaaatgtcagtgtcctcccttgtcctctctggcagaccctgggtatgtgtatgtttcaatggaagtgaatttaaatgtactttataaatcaaagactttttctgagactttggagagttccagtaatgagagcttctcattgttatcaaggccagggctggagaccagtggcaggtgagttcctattgctgtgattgtcatgatgatgttgatgaacagtcactatttattgagcgttctccatgtgccagtcactgtactaaacattatttcctttggatttcccagaaacctctcaggtgggtctaattacccttattcagctgataaggaaagtaagcaacttacaagaccacagggctatgaagtggaaacacataaattgatatttcattttatttatttatttattttgagacagagtctcactgtgtcgcccaggctggagtgcagtggtgcggtctcagctcactgcaacctctgcctcccgggttcaagcgattctcctgcctgcctcccgagtagctgggattacaggtgcccaccaccacatccagctaatttttttgtaattttagtagagacggggtttcaccatgttggccaggctagtctcgaactgctgacttcatgatctgcccacctcatcctcctaaattggtatctttatatgtccaaaagagtcaactggtggcaatttagtgaggtttaatctaataggaaatgatagagctgggatcgaacagagccatgtgaactcaaaacctatgcttccccttccacctttttgaaaaacattgtctaggctgggcacgatggctcatgcctgtaatcccagcactttgggagacggaggtgggtggattacatgaggtcaggagttcgagaccagcttggccaaaaattagccaggcgtggtggcgcgcgcctgtggttcccactgaagcacaggaggctgaagcacaagaatcacttgaacccgggaggtggaggttgcagcgagccgagatcgcaccactgcactccaacctgggcaacagagagactctgtctcgaaaaaaaaaaattgtctacatgctggttgcagaaaatttaaacactaaaactaaaaaagtaaaacacctcccaaacttagagacaatattaatgacggaaaaaaaattcttcaagatctctctctctccagtcatttattcatgtgcgaaaacagttggtgattattgataaaatagcttttagagtttggagcaattatgtgcattacatataccatttgattctggcaacctaatgaaggagtatgatcatttcccctatttaacagacaagaacaagaagagggagggcagatggtgtggtagtctaaggcacaggctccagcagattatctaggtgtaaatcttggctgtaggccaggccctgtggctcatgtctgtaatcccatcactttgggaaaccgaggtgggcagatcacttgaggtcaggagttcgagaccagcttggccaacatagcgaaaccccttctctattaaaaatacaaaaattagccgggcacggtggcaggcacctgtaatcccagctacttgggaggctgaggcaggagaatcacttgaacccaggaggcagaggttgcagtgagccaagatcttgccactgtactccagcctgggtgacgagtgaaactctatctcgatattaaaaaaaaaaatcttagctctacccaccggggcaagttacgtaacgcctctgtgccttggttttcatatctgtaaaatggtgacagtaacagcacccacgtcaaagtgtggttgtgagaacgaaacaagatagtctatgtaaagtgattaaaacagcgtaggcacatggtaaacgcttaggaaatgtaggctgttataaagctcagagatgttaagtaactagatcaagatcacacagttagagggtgccagagtcctgatttgaacccaagtttgtctcgttctggagctcaagctgctaaccctttttcaaaactggaattaaaccaaagtgctcaccctccgctttgctgggcccctccctgccctcaggtgcgtctcttccactcacctgccacagcagcctctgctcagggtctgagaccgggaaaggtgagggctacccaggtggccctgatgttttctgccagccagctcaccaggtccctcgcagcaggcggcaaagggagggaggtttgctgtgaagattatgtggttcccaacaacaagagcgctgggcctatctctgccctctcttttctgtgtgtcctgggacaagtcacttggcttctgtggcttcattttctcatgtgcccagccagggggttggccctcatatgcaataacagcagcaatgacctttactgagtgtccatgtgcgtcaagcacgtgtgctttacacttgttcttattattaggtttaataatagaataattgccacatttactgagcactcattatgggccaggccctgccctaagtgcttaattagctttagctcctctaatccttatcttatccccacacggcatgttatgttatccccattattcagttgagaacattgaggctcaaagaggcaaagtaacttgaccaaatacttgtaaacgatcttgcatgccccttccagctgccatttagtaagactctaatttcataccaccctaaatctcgtctgcttccccctcgtccttctcgccatctccccaccgagcagttggccaagatctgaccgtgatggcggccattggcttgggcttcctcacctcgagtttccggagacacagctggagcagtgtggccttcaacctcttcatgctggcgcttggtgtgcagtgggcaatcctgctggacggcttcctgagccagttcccttctgggaaggtggtcatcacactgttcaggtattgggatggtggctggatcacttctgggtcatagagggaatggaccccgaaaggacaggttccagaagatctgggatattgccccctctctgtctagcaccagtgctgtgcaatatttaggacatccttatactaaaagattattcattgtttaaaattcaaattaactgggcatcctgtattttactggacagccctactccgtgtatcacaaggaatccaggcctacattcctcctgcatcctttctttcctgttattgtcgattatgattttgtaaagttacataatcaatataagtttatggaaaacgtaagaaggaaacacgttagacagagagaaatagacatgccacacctagagagacattctatttttttttttttttttgagacggagtttcacttttgttgcccaggctggagtgcaatggcgctatctcggcacaccacaacctcagccttctgggttcaagcgattctcctgcctcagccgcctgagtagctgggattacaggcatgtgccaccgcgcctggctgattttgtatttttagtagagatagggtttctccgtgttggtcaggctagtctcaaactcctgacctcaggtgatccgcccgcctcggcctcccaaagtgctgggattacagacatgagccaccgcgtccagcctgagagacattctcttgaaaagaaaggactttcagccccctaatgctgctagacaataaatagccatgcctttattttcattaaattacctgtgctttgtttacatgcatttgtgtgaaatgctaagaaccatcacaactaatgtatggtgccagaagtcagaatagttgttacctgggcaggaggtggatattgattaggaaggaacacaaaataaccgcatggggtgcagaaaatgttctctatgttcacctgggtgatgattacacatcaagctatacacgttttaaaagggcattggcacttaataggaggaagtaggctaaattttttcctgaaacattgttttgttttgttcaaacctctgaatccctgtgctgcccagatgatggtaaacgtcatcctaggcatcttagggacctctcaaggccattccagcctccccttctaagaccctgctaaacctctgggcactgctgttaaacatttctctatgagccaggaactgtgctgagcactccacaaatattattttgtttaactcttccgggtagggatctaacctggtatacaggtaaggaagtggaagctcagagagggcaaggcacttgcctagggccacacagctaagtggtggagatggctccaactttttattataaccttttccacatgctccagagtgctcagaacatgaaacacagtctagccagctcccgattggccctggagggaaaaaactttatatatttttcttttttaaaaggtttagaggctgggcatggtggttcacacctgtaatcccagtacttttgggaaccgaggtgggcagatcacttgagcccagaagtttaagaccagcctgactaacacagtgagatcctgtctctgcagaaaatagaaaaatcagctaggcgtggtggtgtgcacccacagtcccagctacttgggaggctgaggcaggaggatcacctgaacccagtgaggttgaggctgagtgagccatgatcgtgccacttcactccagcctggacaacagagtgagaccctgtctcaaaaaacagttttaggggccgggcgcagtggttcatgcctgtaatcccagcactttgggaggccaaggcggggggatcatgaggtcaggagatcgagaccatcctggctaactcggagaaaccctgtctctactaaaaatacaaaaaattagccgggcgtggtggtgggcgcctgtagtcccagccactcgggaggctgaggcaggagaatggcgtgaacccgggaggcggagtttgcagtgaaccgagatggtgccactgcactccagcctgggtgacagagcgagactccgtctcaaaaaaaaaaaacaaaaacagttttaggccaggcgcggtggttcatgcctgtaatcctagtactttaggaggcctagcaggtggattacctgaggtcaggagtccgagaccaacctgagcaacatggtgaaatcctgtctctactaaaaacacaaaaattagctgggtgtggcggcaggcacctgtaatcccagctacttgggaggctgaggcaggcgaatcacttgaacccgggaggcggaggctatagtgagccgagatcgcaccattgcactgtagcctgggcgacagagtgaggctctgtctcaaaaacaaaacaaaacaaaaacagtctatgagttaattcccaccagaattcaatacacacacgcacacatgcacgcatacacacactgtgtccacctgggaagtgacaaagggcaccctgggggatttcaaatggtggtggccctggtttggtgttgctgccttagcttaaggtcacaccagccttcagcctcctgccccacagtctagggctgctcccctcatctgatgtccacagggacctgtttgttcttgactcaatctagaaagacgagaagggagagaagtcactcgcagcctgagtgaactcccctgccccacccctgactgcttggatccccctaggggtgacccctgctgaaactggctccttcctgaccggttcccgtcagggctgtgctgatgggtggtgcccaggcctgcccctggggacggggtactctcccttggcaacactccagcttgtgccacttgacttgggactgatttggttctgttttgagtcccttcaggggaggggcctatcttattcaacgttgttgtttgttttcctcacatactgataacttagcaaatggctattggagcaaaaatgaaaataaacggaactctgaagtgggatgttttaaaattttatttatttttttagagacagggtcttgctctgttgcccagtctggagtgcagtggtacaatcatagctcattgcagcctgtgcctcctgggctcaagtgatcctcccacctcagcctcctgagttaaatttttttacaggcgcctgctaccatgccctgctaatttttgtatttttagtagacaaggggtttcaccaggtgggtcaggttggtctggaactcccgacctcaagtgatccacctgcctaggcctcccaaagtactgggattacaggcgtgagccactgtgtccagcctaaaactgtttttgagacagggtctcactctgttgtccaggctggagtgaagtggcatgttcatggctcactcagcctcaacctcactgggttcaggtgatcctcctgcctcagcctcccaagtagctgggactgtgggtgcacaccaccacgcctagctgatttttctattttctgcagagacaggacctcactgtgttgctcaggctggtctcaaactcctgggctcaagtgatctgcccacctcggctctgaaaagtactggaattacagcctcctgagtagctgagaccacaggcacacaccaccacacctagctttttttttttttgctttttgtagagatggagtctcactatgttgcccaggctggtctcaaactccaggccttaagcaatcctcccacctcagcctcccaaagtgcgaagattacaggtgtgagccaccattcctggccttaaaagtgtgatatttttaatgtattttgaaatctgcaggactctccctagaagataatagcaataaccaactcctttattgtgcttgacgtatatcaactcactttgcccttaccgtggctccagaggcattgggtccaccttataaatggaggcaccaaggcacagagtgattaaataaattgcccaggatcacacagccagaaagtgtctgagtcaagattccagcccaggcagcctagacctgagagcacgctcctaaccactgcacatcactgtcttagcacctcctcagcacaaactggcccttgaggaatgaaataccgccgccggcacacacgctcctgagttaagcctttgtcaatgaaatgaacacccacttaaaaggaataacctgtccaggcacgatggaacattgagtaaccccttattctaaattcctggtccctgtaagactccttccccatgcccttgcccttttctgaccttcccctaaagtccttgaggcttaagcgggcatagtctgcagcaaacactggggaagctgagtccagacttcagagcacaggctttggatctaggccagctggatttgaacctcacatttgtgatcagctggcatgactgtttccaaaaagtccattttaatcctctacgtgaccctctgtaaaatgggatactgaatggtgagctagcacgattttacagagagtgaattttttttgtgtgtgtgtgaggcagtcttactctgttgcccaggctggagtgcagtggtgcagtctcggcccactgaaacctctgcctcccgggttcaagcgactgccatgcctcagcctcgagagtggctgggattacaagcatgcaccaccatgcccgggtaatttttgtatttttagttgagacagagtttcaccatgttggccaggccactcttgaacccctggcctcaagtgatccacctgccttggcctcccaaagtgctgggagtacaggcatgagccactgcacccagccttatagggttaaaatttaaaagaggtgatgctgttacaagcctgttttacaaaatgctcttataataaatcattatcatcactgttgctgtggttgtagcatcatcatcattaactcccagagggaggagggagtctcagagcaagctgctcaggggagactggatgtccatggattgtccagctcagtaccacttcctccaggaagtcctccctgataagtccagtcagcatcaccctctccttccaatgaaccccactagccttgtgatatcacagatattcttagttgacaggctcatggtgtagcctgtctagatcataagtacattttttttttttttggatcataagtatcttcaagaccaaaataattttctactcctgagcatgctcattggtcaaaggaaggaaggaatcataatagcgttaataaggctagcgtcttttcagaagttggttctttgtgccagtcttggtgctagacacaccgataggaagaatactccttcacatccccaggacaccaacatgggatacgtttgatcatcattcttaatttgcagaaggagaaataggctcagtgagatgaaatagccactccagtggcaaggctgggactggaagccgggcttgtcctgattccaaatccagtttctttccactgccacggagacggagagaagggacagtggccccagatggggatggggtgactggatgtgggcaggcctgcgggggaagagtgccctctgttgagcatccgaatgatggcagcagaaaagaagactgggcagaatcccagttatcagatcccctgagggaacagtcaccccgatcaccctcagtcagatgagtgtgtgtagatcaatgcctcatagatgaaggcactgaggcacagagtggttaagtcatctgccagaccacatggctcagggtgcagaggccaccttaacgggagaagagatggtcactccactctgcagcatcagcgcccaggtgggtagaaatcttgtcttctattcccacagaaagtaggtgcccaacagtgtttgttgaaagaatgaatgaatgaatgaatgaatgaatgaatgagtgagaggcatccttccttctcagtcgtcctggctctccctctctcccccagtattcggctggccaccatgagtgctttgtcggtgctgatctcagtggatgctgtcttggggaaggtcaacttggcgcagttggtggtgatggtgctggtggaggtgacagctttaggcaacctgaggatggtcatcagtaatatcttcaacgtgagtcatggtgctgggaggagggacctgggagaaaagggccaaaagctccatttggtggggtttccagggttttgaaaaataaagacaacctgtaatcccagctacttgggaggttgaggagggaagatcacttgaggccaggagtttgagaccagcctgggcatcatagcaagatcctcatctctaaaaagtaattttttctaaattatccagttgtggtggcatgcacctgtagtctcagttactcaggaggctgaggtgtgagttggaaggattgtttgagcccaggagttagggaccgagctgggcaacatagcaagacctcatctctaaataaataggtaggtggatagacagatagatagatagacagacagacagacagacagacaggctgggtacagtggctcacacctgtaatcccagcactttgggaggccaaggagggcagatcacctgaggtcaggagttcaagaccagcctggtcaacatgggggaacctcatctctactaaaaatacaaaatttagctgggcatggtggcaggcgcctgtaatcccagctactcaggaggctgaggcaagagaatcgcttgaacccgagaggtggaggttgcagtgaaccgagatcgcgccattgcactgcagcctgggggacaagagcaagacttcatctcaaatttaaaataaagaaaaaagaaaagaaaagattgatagatagatagatatccaaatgagtttacaaaaatgtggtctgtgcaaatgtttaaacacaacaaaccaatgcctttaactactacagtataatcctgtaggattgtgctattcatgatataattatggttatataaaagtaattaattctcagagcctcaccagcagtgggtccagcaagtttgtacagccagcatcttctttcagtcagtgcgtgtcagtaactgcatatgtcctctcattgggagagcctgtcgaaagtctaaatttgaaggcagctgtgaaggtaaggccaatccaaatggctctcccagatcctctgctgtaaccctgaccctgagtgaggacatagccaaccttcccatctcataggtgagaaagctgatgcctggagaggggaagggactgcccaagatcacatagcaagatagtggcagaacccaagcgagaacccacagttccagcctggcttagaagaaagtgcactggacttggagtcaaaggctggggtttgcatcccagctctgccataaatccctgtgtgactctgggcaatttaacctcttagagctttagtttcttcatctgtaatatgagggtagcagtactaccacatagggttttgagggagtaattgaattaatcacatgagatgatgcatgtttacaaaaaaaagcatgaagcccctttactgtgcctcagtgtcccaaaggactttggattttactctgagaaatacagggagaactagggagtgttgggcagaggagagccatgatctgacttatgttttaagatactctggcttctgggttcagaaaagactgaaggggcaagagaggaagcaggtggagaccagagcggcagtgattgccatcatccagactcagactaggacaatagctgtgagagtgatgggaagtggttggatcctgactgtattttaatagcagaattgacaggatttgctgatagactgcacgtggggtgggagagggtcaagatgacttcaaggttctcatctggcacaactcagcggctgctggtgccatttactgagatggggaatgttggggtgggatagatctgggagggaaaacccagagttcagtgtcgaatgtggtagcgttagggttaaggttgggggagggggggtagagatgtgtatgaaacatcccagtggagacactgaatggagatgtacaagtctgaagcttagtggaaaggttagggctagggatataaatttgggagttgttacaatacagatggtgtttaaagccatgagacccaaggagatcactcaggagtgaggataaagagagatgggaagaagtctgaggactgagtcctagaacaccctgcattttagaggggggacatgtgtaagagccagcaaaggagacagaattgtgcttggagaggcaggaggaagcccaggagagcgtgaggtcctggaaggcaaggaaagagagggccccaggtgggctgaatgctgctgagaggtcaagtcggatgagggctgggaagtagccattggatttggccaggagaccttggcatgcatggttgtagaggaggatgaaggcaacagcctggcttgactgattcaagagcaggagatgagaaagtggagacagcatgcaggggcagctctgccaaggactttgctataaaggggaacagagaaatggaggagaagcaggagggcaataatccgatagagaggaaaaatctgatgatacagaagagagatgaactgcaagagtcaagcctttgagttggaaagcaggagtgggattttgagcactgatacctttaggccgatgcagggacagttcatcttttttttttttttatacaacattttatttaaaaaaattattttcatagaatacattttcacattagagattcccattgtgcggaaataacaatttattacttatagttttatatttgtggacagattgttttagaacaagtagaatacatttgagaattaaatctcagtttacaatggataatattttgatatgtctctggggaaacttgcccttaaatggaacttctgtatcttcagaagcactccaagcgtttcttcctaggatttagaaatttataatatgagatagcagcatttcctaattttaaaatttccctagtatatgtaaccatcagtaggtggtatctactgactagagagggaagtttttgaaaattaaacactgtctaattttctgcaaagtttttattcatgaattaagagtatttccctttgtccattattcccaaggcaaatatggaaatttgatcatgtactaatcataataaagctggattctctttaagagattgagaaattaaaaggcaaaagctgatatatcatgtttagttatattgtgagtcttataagaagctgggaggcaaccccattaactcaccagaatacagaactcagtctcacaacttagatataattcctctcaaaccttttcctcaaagattaaattctgaaaataatcttgtgattaagagaagaaggctgtccaccaatgggcttatctgttatttcttccttattgtgagcttaatggcatgacaaagcagaggcaaagaggcatacatcaattcttcaaagtaggaagtcaaaaaggtcagagcttccacagcatggcaacagctttgcagatgcccacatcgtgatagttgaaatagcaaagcccagcaaaggttaaagctgaaaatgccaaaagccctgccttggcagctttctgcgaggcatccccatgaacataatcagtaacaacttgtccaaggccccagtgaccatgaagagtgagggctgcagccagggaatagtccgtcgcagagcaaggattcaaataagcagccggaagcagacccgggagcaaaacactgacaaccctctcgctagtccagtggagagatgcagccttggagccagaatggtggctcggtgacaagtgtatgtgctgcactccacaccattctgggataggtcggtcctgaagaaatgctgagatatgagcaggtctgaccactggagttcgcagcaacagagctcggcctccttgggcaccgcaaacggcactcagcctccagggaaccgccatctcgttcctgaggcggagagttcatcttaacgagagaaatggcagggactgtgaataggccggcagatttggtggcgggtgccacaggttcagtctcctgcagggagaggagaaaatgccttactaattccttgtattttctcagagaaacaagaggcaccgtcatcagcctcatgtgagggtgggaaggagggatggggtttgcggagagggaaagtgtggtatggtcatctgtgggagtggaagagagtgagagggctgcaggggtgcagcgggactgcaggctggcaccagggtccctagggcttgtagttggtggaaagtgcatcagtgaccagggctgtgtgcagctgctccaggcaggtgtggaagaagcagagttgaacttgcccagcctggagtgctgcccagagtgagcccaaagcccaggggagaccagagatggggctgtttgcaaaggaggaagtataacagtagcccacaaaatctgagctggttaagaaaggagagagagtgaaaatggggagcccagcctggcagcctgggtacacatctcagctcaacccacactagctgaatccatttgggccccttcgttgacctctctgtgcctcagtttccctatctatagaatggggataagaataaggctacttcctagggctgttgtgaggattgaacaagtgaccgaacacttgttcaattttgaacactgttctaaagcatttaggacagtgcctggcatggggtaagtgttgcggcagtgctgttattttcatcatcaccattgttctcaggctgcgttgattggagctgctgaagggaggcaatttaaggaagtgagccggacagataggaggtggtggtggttatcaggtgcgatgcttgaaactgaggcttcggaggcaacagttactggtaatgacaaggtctaaggcttgacagtgggtggcagaagtgtaacgcagggaaagagacgagcggtcaaggagccgagagggaaggagttgggtggactaagatcatttgtggaagaatgatggagagaaaggctgaagggcaggggctgacatcatcagtgaccaagaggcggccgggaggctgagaccacagcaagaaagggagagtgtgatggcatcttcttcaagggagctggggatgtttggggtggaaaaaagaacaatggtctgggagggaatatgggaaatttttttttttttttttttttttttttttgagatggagtttcgctgttgtcatccaggctggattgcaatgttgcaatcttggctcactgcaacttctgccttccaggttcaagtgattctcctgtctcagcttcccgagtagctgagattacaggcacacaccaccacgcctggcttacttttgtatttttagtagagacggagttttgccatgttggccaggctggtctcaaactcctgacctcaggtgatccacccgccttggcctcccaaagtgctgggattagaggtgtgagccaccgcgcccagcctggaagtttgtatttattaatttttggttgtcttcatctgtgtatgtgactttaacccctaaatacttcagtgtacatttctttttttttttttctttgagacagagtcttgctccatcaatcacccaggctggagtgcggtggtgtgatctcggctcactgcaacctccgcctcctggattcaagcaattcttgtgcctcaccctcccgagtagctgggattaggggcatgccaccatgcccagttaatttttgtatttttagtagagatggagtttcaccatattggccaggctggtcttgagctcctggcctcagttgatccacctgtctcagcctcccaaattgctgagattacaggcgtgggccaccataaccggcctcagtgtatatttctgatgcagttgggttctgtatccccctccaatctcatctcgaattgtaatccccacgtgttgagggcatgacctcgtgggaggtgattggatcacaggggtggtttcccccatgctgttcttgtgacagtgagtgggttttcaggagagctgatggtttgaaagtgtggcacttcctctctctctttctctctctctctcacctgacaccacgtaagatgtgccttgcttccctttcaccttccaccatgattgtaagtttcctgaggcctccccggccatgccaaactgtgagtcaattcagcctcttttgtttataaattacgcagtctcaggaagtatctttatagcagtgtgaaaacagactaacacaatttcctaaaacaaggggacattctcttacataaccttttttcagttaacaaaaatgagaaattgacattgatatattatgattaccttattctcatttcaccaattttctcaataatatcttttctagaaaaaaatatatattttttgtggtcgaggattacatcttgcatttagttctcatgtcttattaaattccatcaatctggagcagtttcttcatctttctttatctttcatgaccttgacatgttttgaagtttcgagccagttcttttgtagaatgtgggtttgtctgctgttcctcatgattagattgtgggtatgcatttttggtaggaattctccaagagccgtgtgtgcccttcttagtatatcatatcagaagacatgctatcaatttgccccattactgggtgtgttaactgtgatcattgggttaagatggtacctgccaggatcttccactgcaaagttactattttcccctttgtaattaataaacatcttgtgaggagataatttcctatagaaatcctgttgatcatccaactttcacccactgattttagtgttcattgattcttccctgaataaattagtactataataattgccaatggtggttttctaattccatctttccttcagtagttggcattcttctgtaaggaaaagctttcgcttctctgttcatccactcatctatgtacttatttatatcaccatgggctcctggattccggtttacacacttccattttctgccttttctctctgcttaatataaggattaatgagaactccctgattcccaggaagaaaatgtcagcagagctttcttaggcggaatgaagagaattcagtgtaagaaccataaaggtgtatctgtgtagtatggacagttttaaaaaacaaacaaacacaaagaacctccaagggcaggaggtgctgccagactcaggagggcactagaactggctatgagaagccactgagatcccaggtagtctgtgctctccatcttttggctcttattctctccgtacatctaacatctctgtacaccagctttctctttagcgaaaaacgtgtcccctccacccacccatccacctccacttgttcctgcatttctatgtcccagatcctgcagaaaacaactcttttctctcagttagtctcaattctgtagtccagggagagagaatctgatcagtcccctgggtcatttttccactctggtccaagcagctacagctggcatgggaaatagttcacacagtaaaaacatggctgtcaagaagaggagtaaatttcagaggcagaacactccctgtgagcccgaacctcttcctgctttgttgcagtcttcataacgattgctttaaaagactgcattgatataacatcatctctcttctctgcatctttgacttgctagcttaactggtctagaggagggcttagcactgattttgagtattcattttcctcaaaacttcaattcagcctgggtttcttcagcaggagggcccgggggaaccagagccagggaccagagtcatttcagtgcaccagctcaagaaatgaatattccaggccaagaatccccaagtgttcttcctgaactccttcctggtggagttcaaagagatgaaaaacacaagcccgcttttcagttcttatcaggaaactgcatagactttcctctttatgtatgactgagggctttttaccatcatttgttcccttcacaaatatttatttggtatttactatataccagggactcttgtggcagtggaaaatacaactctcatggaacgtctgttccagaaggaaagactgccaataaacaataaaataggcaaaagatatagcatgttagagagtggtaagtaccacagataaaaatgaaatggagaaaagaaacacgaaaagttggggagagaggataactgtttgagagggtggccaggggcagcttcatcttatcaagagggtgattttttgagtacagacctgaaggtaacgagtgcacaagccatatgggtacctgagaacagcggcagaacaatggcagggtgctgggagggctgtttaccagccacgctgtttagaattgtcagcacatggtgataaaaaaaaaaaaaaaaaaaaaaaaacaggctgggagcagtggctcatgcctgtaatcccagcgctttgggaggccaaggcggatggatcacttgaggtcaggagttcgagaccaggctggggaacatggtgaaaccccgtctctactaaaaatacaaaaattagccgggcacggtggtgggtgcctgtaatcccagctacttgggaggctgaagcaggagaatcgcttgaacccaacgggtggaggttgcagtgagccaagatggcaccagtgcactctagcctggcgacagagtgagactccgtctcaaaaataaataaataaataaatacaaataaaaagcagacagactttttagttggctttagaattcttagacaccctctacagacaaggcaccccgattgcttgcacccagggtggactactccctccaccctgcccttgttacaccctggctgggggtcagcatttcaggcagctgaatgacccaaagtgggaacacgctagtgggtttgaggatgagcaagtggaggagggcaataggaggtgacgcccgagaggtcaggtgagagtggatcctgcagggtcgtggcaagaacctggaccttgactttgagtgacatgggagccgctggaggcttctgagcagaggagtaacatgatctgacttgcattttattttatttatttatttgacgcagtgtcactctgtcgctgaagctggagtgcagtggcgacatctcagctcactatagcctccgcctcccaggttccagtgaatctcctgcatcagcctcccaggtagataggattacaagcaagcatcaccacgcctggctaatttttgtatttttagtagagacagggttttgccatgttggccaggctggtatcgaactcctgacctcaggtgatccacccacctcagcctcccaaagtgctgggattacaggcaaaattagaatatatctagaatttcctgaagaccttagtttggtattataagaagtctggttgcttcatgttgcaaaatttatatcactcatcactcccgcagagttaaaattccgctgagaagtaggaatcagtgaggtgcgtgtccatgtgggtttttgccacacctaagtgaaccttggtcaaaagcatataagagctactgataggccgggtgtggtggctcatgcctgtaatctcagcactttgggagggaaggatctcttgagcccaggagttcaagaccagcctgagcaacatagcaagattccatctttacacaaaatttaaaaattggccaggcatggttgtacattcctgtaatcccagctactcaggaggctgaggtgggaggattgcttgagcctgggagttggagactacagtgagctgtggccacaccactgcactccagcttgagcaatggagcaagactctgtctcaaaaaaaaaaaaaaaaggccaggcgcagtggctcatgcctgtaatcccagcactttgggaggccgaggcgggtggatcgcctgaggtcaggagtttgagaccagcctggcaaacacggtgaaaccccatctctactaaaaatacaaaattagcccagcgtagtggcgcatgcctgtaatcccagctactagggaagctgaggcaggagaatcgcgtgaacctgggaggcaaatgttccagtgagccgagatcgtgccattgcactccagcctgggcagagcctgctgggttgggctgggtaagctctgaacaccagtctcatggcttcaagtcacacctcctaagtgaagctctgaactttctccaaggactatcagggcttgccccgggcagaggatgccgacactcactgctcttactgggttttattgcagacagactaccacatgaacatgatgcacatctacgtgttcgcagcctattttgggctgtctgtggcctggtgcctgccaaagcctctacccgagggaacggaggataaagatcagacagcaacgatacccagtttgtctgccatgctgggtaaggacaaggtggggtgagtggtctcctacttgggctgagcagaatggctcagaaaaggctctggctgaaaaaatctccctcctttaccaagttcccctgggtgtctgaagcccttccatcatgattcatttctttgagtagtgtttgctaaattcatacctttgaattaagcacttcacagagcaggttcaggaggcctggggtatgcagatttcaaccctcttggcctttgtttccttgtctgtaaaatgtggttagctggtatcagcttgagagctcggaggggagacgtgacttccccatctaactctaagtgacaaggctgagactctccagccctaggattctcatccaaaacccctcgaggctcagacctttggagcaggagtgtgattctggccaaccaccctctctggcccccaggcgccctcttcttgtggatgttctggccaagtttcaactctgctctgctgagaagtccaatcgaaaggaagaatgccgtgttcaacacctactatgctgtagcagtcagcgtggtgacagccatctcagggtcatccttggctcacccccaagggaagatcagcaaggtgagcagggcgctgcccttgggcagcacttgggtctaacaggactagcacacatatttatgcccctccccaccccagggccagcgtgggttgggagagggcatgccgggtggtggagctgtgcctgcctctacagtggagctctaggtagaatgctgggtggtcacagtgggcctgggactcaggagactgtccagtgatcaaaggctttctgggggtagtgattaaatccatccatgctaacatgaaacagacctcagtttgaaccccatttctgctagttgctaaagtcagtcaccatgagcgagagtcagcagcaacagactagactagaattagccagcctctctcttccccccaacaaatttcaagaatggaaccatcagaatcagaagtagagaagtatgtgacactagccatgtggctctggtcaagccacttcaacgttttgagtctcagtggcctcatctgtaaagtgggaattaagagatggtgcatgtaaagtgcttaacggggagtaaatggtaggcaaacattagctgctgctattagtaaagagagacgatggtgtgtgtgagtcttgtgggcagagatgggtgagaggggagacaaaacaagttctcatgatgatgggggaaggggctccagctggtggtgtcggagggaagtctggacagaccagtggtggggctcgggtgggaggcactgggggggctggagtggaaagaatgtggccacagatgacagcttcacagcagaattcagtgctaagaggaagtgagtggccatgagttccatggtgacagaaagtctaagacacccagcaaggcaggagtgggtgtcaactcagggaagcccagaggctaatcctaggtgagagctgagggtgtcagataagagcaaggcaaggctccggttctggagcagtgaaggacatagcagagctatgacccaggaacaaggcccagcttattgaaactgggcccagtcacacagggtggcacaggcaccaagtagccaataataataataaaaacaataacaatgatttgtgtctactgggcatttattcatgttctatgccagacactgggctaagagctttatatgtggaaactcatttaatccttacaataaccttatgaagaaggtacatccaaaaccccattcttctaggccaggtgcagtggctcacacctgtaatcccaatattttgggaggctgaggcaagaggattggttgaggccaggagttcaagaccagcccaggcaacatagcaagaccctgtctctaaaaaataaaacaaaaacccattcttcccgctgcccagggacacaccactaatgagtgtgatgggtgcctaggatgctgagcacctggacttcccagctcattccctaaatgctgcacaatcagggtaactgtgccctgagcctaagaggcagtagtgagctggcccatcatgtccactgatgaaggacacgtagccccaacacaggggagaagtggtttcaggatcagcaaagcagggaggatgttacagggttgccttgttcccagcgtgctggtcacttgcagcaagatggtgttctctctctaccttgcttcctttacccacacgctatttctttgcagacttatgtgcacagtgcggtgttggcaggaggcgtggctgtgggtacctcgtgtcacctgatcccttctccgtggcttgccatggtgctgggtcttgtggctgggctgatctccgtcgggggagccaagtacctgccggtaagaaactagacaactaacctcctctgctttggctgaaggccagcaggacgctgggacctgatgggccactgtgcagtgcacagctgcattaggcaggtgtcggcgcattctcttattggcttcaacgcctagtgagggatccatcctggctcggtggcgcatttgttaagatgctcgggagcaggtggcagaacccatttgagcttgcttgggcattggggagaatttgttatcaggctactggggtgtcacagaactcaaggacagggactggagtgttgtggggagccccgaagcccctgttttacttctttctttgcttttcctgaatatctgctttattcttactctatagacatgcttcctcctctttcaccccacattgtggggtgtagtcttttgcttcaagaaagcagcctggtggatggaatctcttggccccaatcccaaattctctggagaaggggctctttggtttaacttggataatgttgtcttcagctgggggtgggcacatcgtgcatatgtggctgctgccggggaaccacgtggatgatgtgagaggagcagcacccagaagagggagtgctgggctgatggtccaggtcgtgtccacttctgattgtttaattcttcttctaagtggatggatctttctccaatactcagcaaatcctgatcgttccagaatacttcattatagccaattggttataatgtgcttctctaagagaaatatttagggacaacaaatcttcatgggtttgaagacttgatggaggaaaaaggagtagattttcgaaggctggatttggatgaacaggggctattcagggagtgcattccaacctaaaattaggaaaaactggctgggcgcagtggctcacgcgctttgggaggccgaggcgggcagatggcctgaggtcaggagttcaagaccagcctggccaacatggtgaaacccatctctactaaaagtacaaaaattagccaggcatggtggcgggcacctgtcatcttagcgactcaggaggctgagacacgagaatcacttgaacctgggagacagagcttgcagtgagctgaaatcgtgccatggcactccagcctgggcgacagaacaagactctgtcttaaaaaaaaaaaaagtggtttatatacagagtggaatattatttagccataaaaagaatgaaatcctgtcatttgcagcaacatggatggaactggaggtaattaaaaaataaaattaaataaggaaaaacgtatcaatacttcgattaaccaaaaccagggcaaatctgattttcatctttgcaaggggaacaaatttcttttatctcctctggctttgaaaccctgaaatgaaaggaggaagggcagaaaaaagaacacatagcaagttatcatcagtctcagcgcccatcgcattccctgagcttgtttccttgacttcatcactggcaggactattcaaaaatgattcgctcattcattcatatattcattcattcatcattccttcattcaacacatacgttttaacactcatcttgcttttcaagctatagtttagtgagcgaaatggatacacacaatacagtgtgagaacagcaagagggcacatctgagctagcctgggatgggtctggaaatgcttcctggagcagaggaaacggttgacagccaagtgttgacagagaagtagtattagccaggcagagacatggggaatgtattccaggcagaaggcacagtgtgtatgaaagcttattgttaagaagagtgtgtggcccaaccaggaaacagacattctaaaggcatagggtccacccaggagcatggtggacccagatccctgaaagatgggaggtgctcaggcacacttcctgggctagttgaggagtctggatatttatttatttatttatttatttatttatttatttattgagacagagtctcattctgtcacccaggctggagtgcagtggtgcaatctcagctcactgcaacctccacctcctgggttcaagtgattctcctacctcagcctcctgagtagctgggattacaggtgcccaccaccatgcctggctaattttcgtgtgtgtatgtattttgttgttgttgttgttgttgttgttgttgttgttgagacggtgtctcgctcttttgcccaggctggagtgcagtggcgccatctcagcttactgcaagctccgcctcccgggttcacaccattctcctgcctcagcctcctgagtagctgggtctacaggcgcccaccaccacgcccagctaattttttgtgtttttagtagagacggggtttcaccatgttggccctgctggtcttgaactcccgacttcaggtgatccacccatgtcggcctcccaaagtgctgggattacaggcatgagccaccgtgcccaacctggatttttattctgaagactaatagggattctaaggaaggaaccagcctgattgaatttgcatatgtgtccacatctgctggctcacggctgtgtgggaggctgagtgatggggaggaaggattactgagtagggatctgaaggtgtggcctcatgctttctttctaaccagctgtgttgtctttgggatggtgcttaaatttgggctagaccagtgggtcttggtcaccccccaggggacatcttacaatgtctggaggcgttcttggttgacacagtggggtgagggctgctactggcagctcgtggggagagaccagggatgctgcttaacatcctacagtacacagggcagcccccaccacaaggaattatcagctgaaattgtgaacagtgtctacactagacccttgctactcatagtgtggtccgtagaccagcagcattggcatcacctgggaccttgttagaaatgctgttagaccccaccccacatccactaaagccagctcttcatttcaacaaactccccgatgatgtgagtgcacattcaagtctgagaagggcttctttgaggtgagccttagtgcccatccccctttggtggccccggataccaagggtgtgtgaaaggggtgggtagggaatatgggtctcacctgccaatctgcttataataacacttgtccacaggggtgttgtaaccgagtgctggggattccccacagctccatcatgggctacaacttcagcttgctgggtctgcttggagagatcatctacattgtgctgctggtgcttgataccgtcggagccggcaatggcatgtgggtcactgggcttaccccccatccccttaacactcccctccaactcaggaagaaatgtgtgcagagtccttagctggggcgtgtgcactcggggccaggtgctcagtaggcttcggtgaatatttgttggctgatttattcagaaattctgtccagcccctaccttggatggatttatcacctctccaggccacctcttctttccaaatagggccacctaggtatagaccaaagacacgaaatcttttgtgatcccacaaacacagagcaggtcaaataggcccaagccaattgagactgtggttcaggtcgtgatgcagagctttgctgtggacgtgctcccactgcgtactagctgggcatgtggcttaacctttctcagcctcagtcgccccattgtaaatggagataatgatactatctcccctcacaggactgttgggatgctactggatttaataagctaatgcagggacatgctaagcacaacccatccctgaggcccagagaggggtgggccttggctgaggtctcactgcgaggtgggaatgtgggcctccagaccagaggtaggtcctgtggcccctagacagtggacagcaatggtcagtttgacacaccagagccctagccattacttcctggatgttgtgtgaatattttctggacatggcttatataaaatgaaaaagtgaattgggcacgatacagggatagatttttagagatgaactggtagcatgatgataatcatattcactgataacatttactactgttattgactgctttaaaagtgttgggcattgtgctagaaaccattatatgcattatctccttgaattctcacaaccgcctactgaggtattctcagactctaagaaatgagatttaagagaagttatctgcccaaggtcactcggctggaacctggctgtaaaaatggctgaagcaggtgatgaggagctgatgcgtttggacgtgtctcagagaaatcatggaggcgctgcggttcctaccggttcttggatgccttctacagagacaaccatagccccaaattatagggatcacatatcagtgggtgagacatccttgcttgggatgaggaggggatgagctgtgtgaagcaaggcgcctctgtgatgggttccagtgatgtgtctgccactgtcttaataactgtgcaattctaagcagaacctttcctgtctctgggcctgagagttcccctctgaaagatgaggacttgacctagcaaggtcctactcacatgcctgtagagaacaggcaggggaagttagaaaaaaaaaaaagccagtgaaggaagggagctcttcagcttgcacccatcatcacagtgcagggacccaggctcagtgttgccagatccaatgacttctcaagagctcaaaatctagagttttgcatgtgctctcccaagtactggcagaaaattcaagattgttagtaacactgtgtggctaaattctgcttgtgggctgcctagattcccaattctgtgattctgtggttctctggaagcattggttctccacagcacctgcatcacttggaaacttgttagaaatgcaagccctacctacggccccaccccagacctacccagttagaaatctgggggtgggacctatcagtccatgtttgaacaagccccacaagtgttctcttgcaagctcaagttttagaaccactgacctatagccaaaaaagaaaaagccaatcagtggttttctggtaaaggattaacttaacaaactggctttccaagaaaataaagccttgattggtagcacttgcaatttctatggtacaaacgcttcccgcatgactgagttcaagctgtcaaggagacatcactatacatggacttgggaagagatgagaacaatcagcccactgagcctatgggaactggctccagcacatccctgcaagtcaactctcatcagggtgagtgagttgaggaccaagaagcagttatcctcttgcctttgcaggacccaggcaaagggaagggcatagtgacagtgatgatctctcttccggaagtctttggtttgctgagagtaaaaggcgtgggcttcaccagtggtgaagccagtcatgcagccttagtcctggtactgaaactctctaaatctcagttttctatctgtaaaatgggaaaataagacctatgtcacagggttgctgtgcagatttagcaacagaacatagccccgttctttatgatgactgatgctgcatccgtatgaggacatctctatgtaatggaaagatggagagaggattaagcgcaaagtcacaacacttaatgggaactgtggattagctacttggtggcattgggcaagtcagttgactttgcattaattccacaaacaatatttcccaatttcctattcagatgagcatatgtgattgagtcagatgctgtgatcagaaccaggatggagcatttcccacaaactgtgggatttttaagtaatgggaaggcacactgaaatggcactgaatcatgcagttgcagatactctttttcaattctcagtcctttgattacgtcagggagaaaagaaagtccccacttggcctgagaatctctgcacccttctagctcttgttaaccactcttttgaatagcagagaaaacctcagactgccatatctgggagagattttagcaacattttgttttcattgtatctctttttacagctacctcccatttcccttctatttcaagctagtaactcagttttcttttaaattcaattatttaaatgtaaaaataagtctatttggagaaaaaaaattttaatagcatctctggaatgccagtatggctaaattcatgaatgttgtcctcaaatgctgaaatctgggaagcatctggccaagctttgtggacaggcctgcctagtttgaatcccaagagccacccagtccaagccacaaaacattggaattcttggttcacttccctaacctgaacttgccctctgtgaaatagggacactaatagctcactcacagggctgctgtgaggacatgtgttgagctgagggtctcgccaggggagaccctgtgcagggagactgttatcatggtgatggatttctgcttcattcatttctttttccagacagcatcatatagaatgagttgtggggtggcagtcagcaggtttgggtttatcctctattctgccacttattacttaaaaaaaccccaaaaaacccaacttatatagtataagctatatccagaaaagtgcaaatatcatacaagtaccatttgatgaatcttctgatatccccacataaccaacacccagaacctcttcttgtctcattccaggataaccactaacctgacttctaacagcatcagtcagttttgtctgtttttgtacattatatatgtgatggtttgaatgtgtcccccaaatttcatgtgctggaaacttaatccttcaattcatatgttgatggtttttggaggaagggcctttgggaagtaattaggattagataaggtcatggggtgaggtatgatggcactggtgacttataagaagagaaagagaaatctgagctggcatgctcttgccctctcactgtgtgatgacttctccatgtcatgatgcagcaagaaggccctcaccagatggtggcaccatgcttttggacttcccagcctctagaactgtgagctaaatcaatttattttctttataatcacccagtttgatattttgtcatagcaacagaatatggacaaagaaagaaaattaatgcaagaagtagagtttttactgtaacagattcctgaaaatgtggaagtggctttggaactgggtgatgggaataggttggaagagttttgaggagcaggctagaaaaagcctgtattgtcaagaatggagcattatgccaggcacggtgtctcaggcttataatcccagcactttgggaggccaaagcaggtggatcacctgaggtcaggagttcgagaccagcctagctaacatggtgaaacgctgtttctaccaaaaatacaaaaaattagctgggcgtggtggcgcacacctgtaatctcagctactcaggaggctgaagcaggagaatcacttgaacccaggaggcagaggttgcagtgagctgagatcgtgctattgcactccagcttgggcaacaagagcaaaactccatctcaaaaaaaaaaaaaaagaaagaaaaagaatggagcattaaagacagttctgcagttctggtgagggcttaaaggaagaccccagaactagggaaagtctggaacttcttaatggttactgaagtcgttgagatcagagtgctgatagaaatatggctggtaaaggccattctgatgaggtctcagatagaactgaagaaccacgtgttggaaactggagcaaaggtcatcctttttataaagaagcaaagatcttagctgaactttttctgtgccagagtcatttatggaaggcagaaaatctgtaggtcagccatgttgtagggaatgaaagaacattttcagctgagaacactgagagtgtgacacaactaccgactgataagaaaactagtacacataaattagccaggcgtggtggtgggcgcctgtattcccagctacctgggaggctgaggcaggagaatggcatgaacccgggaggcagagcttgcagtgagccaagatcgcgccactgcactccagcctgggcgacagagcaaaactccgtctcaaaaagaaaaaaaaaaggaagaaagaaaattagtacacatagaacaaagccagaggctgttcatcaggacaagggagaaaaactccaaagccatttcagagatcttcaagactgcccctcccattactggcccagagctctaagagggcagaatggtttggaatgaccagctgctgcccagggctgccttgggtctctgctccccacatttctggtgcagcattcctcagccatcccagctgtggttcaggtggccacaggtgtgatgtggaaggtaaaagtcataaaccttggcagcatacacatggcactaattttgcaggtgtgcagaatgcaaaagctgagggggcatgccttcttccacctacatttcaaagggtgctgtgaacagccaccccagagagcccctagtagagcagggtctagtggagctacaagggtggggccaccgccaagaccccagaatggtagagctatcatagtgcaatgccagcttgggagaactgcaggcatgagactccaacctgtgcgaagtgcaacatgggcagaacccagcaaaaccacaggggcagagctccccgaagcttcgggggtccaaattccatagtgtgtccaggaggtggcacacagagtaaaagatcattctgaaggtttaaggtttaatgttgttttctatgttgggttttgtactttcctggaaccagttaccctttttcccttgcctctttttccttttagaatgggaatgtctgtcctatgcctgttccactgttgtattttggaagtcaataacttgttttgactttacaggcttacagccagagggaatctcccatagaatgaattgtaccttaagtctcacccacatctgatttagatgagaccatggactttggaattttgagttggtgctggaacaagttaagactttgggggttgtctaagtgtggtgtttcatgcctgtaatcccagtgatttgggaggttgaggtgggaggattgcttgagcccaggagctcaagaccagcctgggcaacatagtgagacctgtctctacaaaaaataaaaataaaaaaattagccaggtattgtggcatatacctgtaattctagctactcaggaggctgaggtgagaggatcacttgagcccaggagtttgaggctgcagtgagctatggtcgtgccactgcattccagccagggcaacagagtgagactctgtctctacaaataaaattaaataaacttagctggatatggtggcacacatctgtagtcctagctactcaggaggctgagacaggaggattacttgagccaaggagtttgaggctgcagtgagctatgatcatgccactgcattccagcctggatgatagagcaaaatcccatctctaaaaaaaaaaaaaaaaaaaaaaaaaaaaaaaaaaactttagtgctattggaatgaattttgcatgtaagaaggacatgcattttgggggctggggcaggatgctgtggtttgaatgcatccctcaaatttcatgtgttggaaacttaatctccaaattcatatgttgatgaaattggaggtgaagcctttgggaggtaactaggattagataaagtcatcagggtggggcccctatgatgagactggtggcttacaagaggaagagagaactgagctgacatgctcttgccctcttgccatgtgataccctctgccatgtaatggcaggcacagcaagaaggtcctcaacagatgccagcagcatgttcttggacttcccagcctccagaaccatgagctatatatacttattttacaaattacccattctgtggtattctgttatagcaatagaaaatgaactgagataatatacatggaatcatacagtaagtctgtgcttttgtatgcttcttttactcaacattgtagttgtgagattcatccaggttgttaagcattgctgtaccctttttccactgggatatagtgttctgtcatgcttgggtcttaatttataaaggtgactgagtggcattttcttccagtattattggaaggaaagttttgttgttcacagttcccctgtaaacaagaggcagaacacgtcatgcagggccacacaaaactgtatcatccagggaccaggcagcagaaagagagggggaactgggactatgcctttatgaaaaagagtggtgggagagtaactgggtgagggcatccactaatgggcaggaagtgaaaacacatatgttagaatttgtagctgaggggtttataatatgagtttcctatgcctgagaaagctgacttgcaagaaaatgagataaacaactttggccattagtgtggccctgtcataaatgaatgccagataggcaaatagagaatctaagaaaagatagttggaacaagtgttccattgtgtgaatgcagcagaatttatttatccattattgaggaggatttgggtagtttccagtttggagctattatgaatattctagtattgctcctatgaacattctagcacttttatttttggagcacacgaatgcacttctgttgattatatgcctagaagtgaaattgttgaattatacagtattcacacagtcagctttagtggctactgctaaacaattttctctagtagtttgcgccaatctaatcaccagtagtgtatagaagctccttttactccacattttgccaacacttggtgttttccttctttttgattagtcatttagcaatcaaacctattgtttacattttgatatctccaataactaactaaatggagcacttttaatatgctttttggacagttgaatatcttttcttgtgaaatgtctattcaagttagtttgcccattttctattgtggtgttctgtctttttcttattgatttgtaggaattccttacgtatcctggatatgaatcccactttgtgcgttacctttttccttctttctttctttttgaaacagagtctccttctgtcacccaggctggaatgcagtggcgctatctcagcccactacaacctctgcctcccagcttcaagcaattctcatacttcatcctcctgagtagcttagattacaggcgcatgccaccatgcccagctaacttctgtatagacaaaataatttttggtagagacagggttttgccatgttggacaggctgatcttggactcctggcctcaactttggcccaccttggcctcccaaagtgccaggattacaggtgtgagccaccatgcccagcccaccttttactttcttaatggtgtcttttgaacaagagaggttcttaattttaatatagcccaatttatcattgttccctttatgtttagttcttttatgtcctttttaagaatttttgcagccagcgcggtggctcacacctgtaatcccagcactttgggaggctgaggctggcggatcacaaggtcaagagatcgagatcatcctggccaacatggtgaagccctgtgcctactaaaaatacaaaaaattagctgggcgttgtggctcttgcctgtagtctcagctactcgggaggctgagatcacgccactgcactccagcctggtgacacagcaagactccatctcaaaaaaaaattttttttgcaaggtcatgcatatgtccccctgatttttttcctaaaaatcacttattattagatcaatgaattgagtaattgactacatttttcagtcattcaacaaatatttccctgaggttttgataacctgaactgtgtttggagctggggaggaagcaaactattgaagatatacaaagatggcaaagatgagggcctggagcttgccacacggaaggggggatggctgcctgaatggttgggcaggtagttgttgacatctgcactccctacatgagcagcagggtggcaactctttttatctttttaatttatttttcttttctttctttctttttttttttttgagatggagtctcgctgtgttgcccaggctggagtgcagtggcgtgatctcagctcactgcaaactccacctcccaggttcacgccgttctcctgcctcagcctcctgagtagctgggactacaggcgcctgccaccactcccggctaatgttttgtatttttagtagagaaggggtttcactgtgttagccaggatggtctccatctcctgacctcatgatctgcccgcctcggcctcccaaagtgtggggattacaggtgtgagccaccacacccggccttaatttatttttctagtctgcaggtaattctttttaattctctccactctcctatgatcttatgaggtagggactgtcattatttctcccactttataatgaacaatcagtaaagacagggaagataaccaaatgacatacaaggtggggtccaccccatgaggctgcaggcttggagctttgctttgtcttaaaaatgagaacatgagctgcccacctgttgagacaagaaacaggaaaggcttaaaaaactggcttgttatgtacaactatccgtggggctgcagtgaacgggctggcagtgcccaggtgcaggctgaaccctgggacaatcacattcagcatccaagggcccccgtaatagcttaatgtttgaattgaacccctggggttgccttgaaggagagaggtcgtggaagtatgttcaaggggtagggatgggcaggggagatgggtctgaaagccaagctctaccccacccaccttgccccaagagaaatagaaccttcatctttaattgcctaacgagaaaactggggctggccagatgtggtggctcatgtctgtaatcccagcactttgggaggccgaggcgggcagatcacttgaggtcaggagttcgagatcaccctggtcaacatggtgaaaccccgtctctattaataatacaaaaattatccaggtatggtggcgcatgcctgtagtcccagctacttgaggcacaagaatcgcttgaacctgggggacagaggttgcagtgagccgaccactgcactccagtctggacgacagagtgagactccatctcacaaacaaaaacagaaaaaaaaaaaaaaaaaagagagagagagaaaactggaggctctgagaggttgagggacttgcccagggtcttgcagctagtaagtgacagagctgggacttgagcttgggttttctgactcctggtctggttcattatccatgaggtgctgggaactaaaataagccacaatcttggaatctccgtcgcctccctccctcccacatgtctgcgtggctttttgggaaaatgccaggggaatgtaccagccagggagaggacccttgttttcctcatggcccttcctggcaatggcactactgacaccgacagtcctttttgtccctgatgacctctgctgcctgatgcccaagtgaccacctctgctttgtcatttctaggattggcttccaggtcctcctcagcattggggaactcagcttggccatcgtgatagctctcatgtctggtctcctgacaggtcagtgtgaggccacctttcttccaccattgccaggacacagcacccacgtccagagcgcaccctgccgtgtggctggatgtctatgtgccccatctccttccctgaggatcacataatttcagaattggaaaggttcttagaggtcacctgctgctaatgtggactgtgaggccagggcagggaagggacatccctgaggttataagtagggtgagtggcaacgttgcagacttttgaacccagggctggtgatcacactcagttttgcacagaagcccgagaaaatccttacacccaaaagcctaccttttatttctgaggacacccataatactattttattcaacagatatttattcaatatccactatgagccaggcactggggacacagcagtgagcaaaacaaattccctgaccccatggaattgaccttctagtgggggaaggtattagcaataaatagacaaataagtgtctactacgccagatgggaagaagtggctgtgaagacagagcaaactagagaaacatagagtcaatgtgggatggggtgttcttttaggggggtggtcagggaaagcttatctgagtagttagcttttaagcagagaccccaatgaagaggagggagatatgcgatgcatttagttaggggaagaacattccatgaaaataggatagcaagtgcaaaggccctgagacagcagcatgctttgtgtgttgagggaacagtaaggagaccagtgtggttggtgtgaatggagtgagaaggagcagcaggggttgagggcagaatggtagtgaggagcaggcccttataaaagatgggaagccactggagatctttcaacaaaggggaaaagtatgtttctgttcttgcaataaaatagaacagcaaaaaatctaggggagttgctaattagccagttttacttatatgccaggtgaaaatatgtggctaggtgcagtggctcatacctgtaattgcagcagtttgggagaccgaagtgggcagatcatctgagatcaggattcaagaccagcatggccaacatggtgaaaccccatctctactaaaaattaaaaaataagccaggcgtggtgttggatcccagctacttgggaggctgaggcagtagaattgcttgaacccgggaggcagaggttgcagtgagccgagactctgtctaaaaaaaaagaaaaaaagaaaatacacattcaggccaggtgcagtggctcacgcctgtaatcccagcactttgggaggctgagacaggtagatcacttgaggtcaggagttcgagaccagcctgaccaacatggcaaaaccctgtctctaccagaaatacaaaaattagccaggcgtggtggcgtgtgcctgtagtcccagctactggggaggctgaagtaggggaatggcttgaccccaggaggtggaggttatagtgagtcgaggttgcaccactgccctccagcctaggtgacagagtgagactgtctcaaaaaaaaaagaaagaaaatatacattccatccagaactgttcacctttattctacaagcaaacatcttttattggttagacacccatatatgtgtccctaagcaggaggtgaatgccaaataagagacaaatggcgtaagacactatgagttgtgtgacgttgggcatgtcactttactccctctgagccttggttagcttctctgtaaaatgaaaggattatggtaactaagctggcttccttccagctttaacaaactgtatggaggtactttttggagttacctgggtaatttttgagtgtgagattggctagaattgctttaatataccatgtctggccttagctttttgcagagtctttgtgaagaagcagaggcggagtagcgttaattccgtaagttaacgttcagttcgtggcagctggcaatccaaccctgggaaaggctgccggatttagcaaaaatgcaaggtgtctgtttttaaatttgaaatgaattgggtatcctgcattttatttggcaaccctgtcctgggactcacactattcactgttatcactggtatgttcaaagtggtgctgacttgccctctgtcttgcaaagtaccaggaggtcttttcttattcttcactggagtcaaaaaagagaatagaggaaaagacaatcatattgttcctttaagagttaagaccaacaagttttcttctttacatgttgtttttgacatgagcaaactggtgattaaaaacaacttgggtggctcatacttgtaatcccagcaccttgggaagctgaggtgggagaatagcttgaggccaggagttcaagccagggcaacatagtgagaccccatctctacaaaagatacaaaaattagccaggcgtggtggtacacctgtagtcccagctgctctggaggctgagatgggaggatcagttgagcttgggaggcagaagttgcagtgagctgagatcatgccactgcactccagcctggacaacagagcaagaccctgtctcaaaaaaggaaacaaaacaacttggacaatggaagggggaaaaagttcctcaagcagccaaaattgcaccaaatggactcccagaagacaagcatttaatttgttaattgagccctctatgggcctgtctgtatttatttaagaaacaatcctatcaagcatagttattgggtttctcagcccaggtagattagaaatagcagattagaggtgggctaggtttctagaggtaaagtacaccagcagaagttagaagtgaaagcaaagagcctaacagaggaagagaaattcttttttttttctttttttagacgcagttttgctcttgttgcccaggctggagtgcaatggcgctatctcggctcactacaacctcagcctcctgggttcaagtgattctcctgcctcagcctcccgagtagctgggattacaggcatgcaccaccacacccggctaattttgtatttttagtagagacagggtttctccatgttggtcatgctggtctcgaactcctgacctcaggtgatccgcccaccttggcctcccaaagtgctgggattacagggataagccactgcgaccggccgacaaattcttaaaactggacacaagaacacaaaacgcttgggctgctgagagattagaacaacaaccctccacagctacacaccttttccacgttatatggcacgttataagtgggtgttcctagtgatggttctgattttttttaaaaaaagtctaaatatgtttaatgttgtctcagaagacaaaatatattttagacagatattcctcagtgatgagtaagcctcagctatctggaaaattcatgcaggcgccagagatcgttactgagtaattcaagctaactgcgtcatgctggttgtaccctgcatgccaatatcagctaaaagcagcaccacgaaagggaaatacgaatctcactaagcactcgcccattcttgttaacgacactggaactgatcatccttaataatacacagataaatctatcaggagcatttccttgcttcctgtgaaaggaagcactcattccatgtgtcctgtgaaattcatccaacttcaggaagctggaggaatacatatggccaagctatctgggcagagagtagacagggaatggaggttgggcacagtggctcacacctgtaatcgcagccatttagaaggcaaaggcgggcagatcacttgagctcaggtgttcaagaccagcctgggcaacatggctaagtcctgtctctgcaaaaaataccaaaaactgagctggatatggtagcacacacctgtggtcccagctacttgggaggctgaggtgggagggttgcttgaccccgggagtttgaggctgcaatgagctgtgattgtgccactgcactccagcctggataacagaatgagactctgtcccaaaaataaaaaataaaatcaaagacacttaaaaagatggggaaaaggaaggacaggcacttaagcaagttataagctactttcctaactacacaagtggaatcttaagctgaggttcccaggagttgactggagccagagaagacagacctataggagcacccaattggagtcaccctccatagtagcccatatgtcttacatggatcagctttcgtggggcccttttactccatctggggaagggcgtcagatctgtggctctcatgtactgctcagtacactgccattcccagttctttttttcaaaaaaaaaaaaaaaatgtctacagaatcggccaggtgtggtggctcatgcctgtaatactagcactttggaaggctgaggtgggtggatcacctgaggtcgggagttcgagaccagcctggccaacatggtgaaactccatctctactaaaaaaaaaaaaaaaaaaaaaattagctggatgtggtggcaggcgcctataatctcagctacttgggaggctgaggcaggataatcgcttgaacctgggaggcagaggctgcagtgagccgagatcacgccattgtactccagcctgggcgatagagtgagactctgtctcaaaataaataaaataaaataaaataaaataaaataaaataggctacagaattaagctggtccaggaatgacagggcttccatttatttgtctttcaattgtgggagaaaaaggatttctgttgagatactgtcgttttgacacacaatatttcgattaatcttgagattaaaaatcctgtgctccaaatcttttaacattaaattatgcatttaaacaggtttgctcctaaatcttaaaatatggaaagcacctcatgaggctaaatattttgatgaccaagttttctggaaggtaagatttttcacctattaacgtgatagattttgagtgcatgaacttaaaaacatacctgagtatatatgttgacttgctgtttatgagtaaaacaaaaacaaaaatggagtaaggagcattgcaggaggaactagaggagaaacaaatccatgatatgcatgtgtgtgggggagggtggcggggaggtggtaaaggtcaccatttccctgatacctcaaattcattcagagtcagggatgagacagctttcactggccacacttcccctccccctatctgcagtcctcagcgtagccaaatagtctgacatgcgggtgacagaaccccacaatgcaaaagctggaagaaacctcaagccttggagtccaaccccttttttgacagatgctaagagtggagacatgacttatcaagatcttacaactggctgggcacggtggctcacgcctgtgatcccagcactttgggaggctgaggtggggcgatcacctgaggccaggagttcgagaccagcctggccaacgtgtcgaaaccccatctctactaaaaatacaaaagttagctgggtgtggtggcacatgcctgtaatcccagttactcaggaggctgaggcaggagaatcacttgaacctgggaagcgaagtttgcagtgatctgagatcatgccactgcactccagcctgggtgacagagcgagactttgcctcaaaaacaaaacaaaacaattgtacatatttaaagtgttgtaaccaagtgagttacagagaaacaccacactttgagcctaattcaggagtcctttattagccggcgacctagagacgactagtgctcaaaattctctcggccccaaagaaggggctagattttcttttataccttggtttagaaaggggagcgggaattgagctgaagcaatcttacagaagtaaaacaggcaaaaaagttaaaaagacaaatggttacaggaaaacaaacagttccaggtgcaggagctttaaagccatcacaaggtgacaggtgcgggggctctgggtgctatctgccggacacaaacgcaggggcactagagtactatcacccgggcaaattcctgggaactgcggacacagcttgccacagtaccttatcagctaattgcactctttgatgtgctgggagtcagcttgcacaagttaagtccttgaggaagggggtgggtaaggagcccttaacgtcttgcaaatgaaggagccgaatggaatccctccggctttcttagctaagagagagtcaatcaagttaatacaagttagggtatcacaaaagtatataatttgatacattttaacgtatttatacactgaagagaccatcaccaccatcaagacaaggagcacacccatcacttccacacacttcctcctgctcctttgaaattcctccctccctacccacctggtcccacccaaaggcaaccactgaactactttctgtcactaaggtttgcattttctgtaatttttttgtttgagacagggtctcactccgccacccacaccgtaatgcagtggcaccatcatggctcactgtagcctcaacctccccaggctcaggagatcctcccccctcagcctcctgagtagctaggaccacaggtgtaggccaccatggcaggctaatttttgtatttttttgtagagatggggtttcaccgtattacctaggctggtctcgaactcatgggttcaagcaatcctcctgccttggcctctcaaagtgctgggattataggcatgagccactgtgcccagccctctgtaatgttacacaaagggaatcatgcagcacgtactgcccttggtctggcttcttttgctcagcatgattattctgagaatcatccgtgttgttgcgtgtaactgacttcatcagcttctctctgcagctgtcagctcttggcttctcccaacagccaatctctctttatcccctgcaagtgttcttgcctatttagcagaatcaaggtactctatcgaaaagactcggaaaattggtttaatctattcattcattcctcaggtatttatcgaataactattctataccaagtactatgctaatcaaccaaggacagcacaaacaggagaaatctccagctcagtcacttgagttgcaataaatatttgctggataggtcaggtgcagtggctcacacttgtaatcccagcactttggggattactgagacgggaggatctcttgagcccaggaggccaaggctgcagagaaccatgatcatgccactgcactccagcctgggtgacagagtgagatcctgtctctgaaaaaaaatatttgctggataaattaaggaaatctgacgaaccccatcagtagccattgcagcaacaggtaaactagaacgagtgtgaatttggaatgaggaaacccgatgttggccatcattctgtaatgtcatgtattatgtaatgtattatatattaatgtatgtattatgtaggcaagttccttgacctctctcactggtaacataagagtagtaatctttgtgctacttcactgggttattttaaagatcaagtgaggtaataatgtctgtaacaacattctgtaaaatgcaaaccgccacatgaatgtgaaagtttattactagggatttagccaaccacaagggaatgtgtgagcataagagctatcatattgcaagcctacagtttctgattttgtgctaggtgcttttccacattacctgattttatcctcacaacagccctgcataaaagtaagtatgtcgcccaggtgcggtggctcatgcctataatcccagcactttgggagcccgaggtgggcaaatcacttgagatcaggagtttgaaaccagcctggtcaacgtggtgcaaccctgtctctactaaaaatacaaaaaaaaattagacaggcgtggtggtggatgcctgtaatcccagctacttgggaagctgaggcaggagaatggcttgagcccgggagatggagattgcagtgagatgagattgcgccactgcactccagcctgggtgacagagcaaggctatgtctcaaaagagaaaaaaaaagtaagtatctcagtcttgaagatgatgaaatggaggcctagagagattaagtaacttgcccaaaatgacagaactaatgcatagaaaagaagaaatgtgatgtcttttggctccaaagacaccccacatatgcgttggttacagttactagagaaaagttattccacccccaccccacccccagaaatcttctgacttgttttctcgcagttgagtaggaccatttattcggcagtgtaccattctcagcttgcagttgaaagccaaatatccattaaagaggcaaggatgcaaacttgctaagctgataaatccaggggtgattttttttttttttgcaaaccatccaacaagacattttaaatactcattgaatttcatagaactgactgccaggattggaaagacattaaagccagctcagccactgcctcgctggttggccagaccacgcctggcacttctgggagggagcactcaccaccccccaagggcacccatctcatcctccgaaggtttatgaaaatgcactcatcatttgctaattcattccactacgtgtattacctaatttgtgacacgatgtgaagtaccagagagataattctaaataaaatatagttatgggtctcaaggagccagatatgctaatctcctatcctcctgcagtttacagtggtcctcaccagatacttatttacaaaaattcagtttattatttatttttttgagacagagtcttgctctatagctcaggctagagtgtaatggtgtgatctcggctcacttcaacctctgcctcccaggttcaagtgattctcctgcctcaacctcccaagtagctgggactacaggcacctgccaccacggctaatttttggagttttagtagagacagggtttcaccacgttggccaggctggcctcgaactcctgacctcaggtgatctgcccacatcagcctcccaaaatgttgggattacaggcgtgagccaccatgcccggccaaaacttcagtttataacacaatctttcacgtgtcttctgctttcattaaaagaatagacagttcccttctttatttcagtttaataaaccatggattttatttcatgctttgcaaaacacaagggctcactgacatgcacttcttaaactaattctggctggtcgcctgtaattccagcactttgggaggctgaggccgacagatcacttcaagtcaggagttcaagaccagcctggccaatatggtgaaaccacgtctctaccaaaaatataaaaaattagccaggtgtggtggtgcgtgactataatcccagctactcaggggcctgaggcagaaaaatcacttgaacccgggaggcggaggttacagtgagctgagatcgcgccactgcactccagcctgggcgacagagtgagactctgtctcaaaaaataaataaatacaaataatgtaaaatacgaaacaagcaatcctggcagtagctgctggaatgagaggagggagaggtcatagggaggtcggggacaatggagcatggagttgtgttggatttggctaagcagcaggaagtgcaaggcattccaagcaagaggaggggggcaggtggggagcatctgcaagaacagaagcagcatgagcaacctggctcggcagtgtgtgaaaaggctgaaaggtggctagagccacttcaatttcatccttcaggcaaatgggaaattcccaaaggtttgagtggggaagcaatgcctacaatgaaagtttgagagtgaagcagagtgatcgaattaagcatgtaggccgagttctgaaataactgcaatgtgctgaagatcatccattggcttctgaatgagtatttgcagtttattttttaaaatgattttattgccaagaaagataaacactactgttttggtacaaaaacataacaaaatgtgttgagtccctcttgctgttttacgcgaagttttaaaaatctactcttgtcacagtggtatcacccctacttctgatttcaaataaatgttctagagacacagtaagggcccaacaaacgcttgttcaacaacacaaggagagccagcttttaaagtaggaaaacaggccgggcgccgtggctcacacctgtaatcccaacactttgggaggctgaggtgggcagatcacttgaggtcaggagttcaagaacagcttggccaacatggtgaaaccctgtctctactaaaaacacaaacattagccaggcgtggtggtgcacaccagtagtcccagctattcaggaggctgaggcaggaaaatggcttgaactggggaggcagtggttgcagtgagccgagatcgtgccactgcactccagcctgggggacagagggagactccatctcaaaataaaacaaaacaaaaccaaatcatacaaaaacattagctgggtgtggtggtgcatacctgtaatcccagctacttgggaagctgaggcagaattacttgaacccctggggggaggttgcagtgagctgagatcttgccactacactccagcctgggcaacagagtgaggagactctgtctcaaaaaatatatatattaaaaaaaagaaaaaaaaaagtaaactaggaaaacacatcagcagcctgccaacagactcccctagcctcggtgagggccagtgttctgggaggcagatctgaattctagtcctagttcacccactggcaggctggtgcccttgggcaggtcgcttctctggggctcagtttcttcctctataaaatgagatcaaatcccatgttctaagagtttgtgctctggagtcagacagatctgggttctaccactgccagctctgtgatcttgtagcttcagtctcgtcatctgacatggagataacagtaactgtctcactgtgttgttagggtttaaaggagataatgtatgtgaaatgttagcaaacaagtgttagctaccctgatttccggtttcagagttctgtggtcccagtttatgccacatgcagtgacgttgtatggtaggctgtggtgtggcaccacttcagaactcagcgcatgcacagcttgcagaagagaaggccagaggagacctaagaaggctcttcgaacacttgaaagaccggcatgtaggccgggcgcagtgactcacgcctgtaatcccagcagttttggaggtcgaggcgggtggatcacctgagtttgggagtttgataccagcctgaccaacaaggtgaaaccccgtctctactaaaaaatacaaacattagctgggcatggtggcgggtgcctgtaatcccagctactccggtggttgaggcagaattgcttgaacccgggaggcagaggttgcagtgagctgagattgcatcactgcactccagcctgagacaagagcgaaactccatctcaaacaaaacaaacaaccaaccaaacaaaaccaaaaaaaaaactggcatgtagaagaaaaatactttttctctacacttctccaaagaatttaactaggcccaggggaggtgcagtataaatttctaacaatctcaactgtctgccaaatggaatgagctacttcatatggcagtagtgagtcctctgtctttggaggcattcaaataaaagccagatggccatttatcaacaatccatgtaaaacgttagatgaaataaaacctatatatccaagatctcttccaattcagattttatgaaagaatttctaaggtctttgtaatgagacatttaggctgtttcaagagatcaagccaaaatcagtatgtgggttcatctgcaataaaaatgtttgttttgcttttacagtttcctcatttggctgttggattttaagcaaaagcatccaagaaaaacaaggcctgttcaaaaacaagacaacttcctctcactgttgcctgcatttgtacgtgagaaacgctcatgacagcaaagtctccaatgttcgcgcaggcactggagtcagagaaaatggagttgaatcctttctctgccactctttgaggagaatctcaccatttattatgcactgtagaatacaacaataaaatacagccatgtaccacataacaacatcttggtaaacaacagactgcatatatgatggtggtcatccagtaagctaaggttaatttattattattccttgtttttttttttttttttttttttttgagatgtagtcttactctgtcacccaggctagagtgcaatggcaccatcttggctcactgcaacctctacctcctgggttcaagcaaatctcctgcctcagcctccaaagtagctgggattacaggcacccaccacatctggctaattttttgtatttttagtaaagatggggtttcaccatgttggccaggctgatctcaaactcctgacctcaagtgatctgcccgcctcggcctcccaaagtgctggaaccacaggcctgagccactgtgcccagccttgtttgcttttttaacagataacagtgtgctcatagaaactgctttgacatgactgcaatcatgtgcttcatagaaacttaattagattataccactagagtcttcagatttttatactttttttttttgaaacggagtctcactctgtcaccaggctggagtgcagtgccgcaatctcggctcactgcaacctccgcctcccaggttcaagcaattctcctgcctcagcctcccgagtagctggaattacaagtgcgcactaccacacccagctaatttttgcatttttacttgacagggtttcaccatgttggctaggatagtttcaccaggatctcttggcctcatgatcagcctgcctcggcctcccaaagtgctgggattacaggtgtgagccaccgtgcccagcctatacttccctttttgaataccatttggtgttttgaagaattaacagctttgtgaacgtggcagtgcttgtgattcaggcttccattgagaccaaggggagaacctggttgcaggacaaacagacggacagcgtgtggcagtgtttaaatgctcttctgaaggctgatacgacagctctctgtgcactgattgcatatgcatcccaagattatattattgttttctactgctatgtgtcacactttgccaaacaggatgtggaaaatgaataagcggttttcttaggcacttcttaacagacaattggtcaaaatgaactccattgcttaagaaacacataaacaccatttagtcactgaacatagctatatgtatggttgttactatgggaaatcttgttttgccaattttctttgaaaattctggcagaccaaggttctttttgtttacataatacttgaaaaataaaaatgaacaagctaacaaacta

SEQ ID NO: 84 - DNA, 58053 bp, Homo sapiens
tagtttgttagcttgttcatttttatttttcaagtattatgtaaacaaaaagaaccttggtctgccagaattttcaaagaaaattggcaaaacaagatttcccatagtaacaaccatacatatagctatgttcagtgactaaatggtgtttatgtgtttcttaagcaatggagttcattttgaccaattgtctgttaagaagtgcctaagaaaaccgcttattcattttccacatcctgtttggcaaagtgtgacacatagcagtagaaaacaataatataatcttgggatgcatatgcaatcagtgcacagagagctgtcgtatcagccttcagaagagcatttaaacactgccacacgctgtccgtctgtttgtcctgcaaccaggttctccccttggtctcaatggaagcctgaatcacaagcactgccacgttcacaaagctgttaattcttcaaaacaccaaatggtattcaaaaagggaagtataggctgggcacggtggctcacacctgtaatcccagcactttgggaggccgaggcaggctgatcatgaggccaagagatcctggtgaaactatcctagccaacatggtgaaaccctgtcaagtaaaaatgcaaaaattagctgggtgtggtagtgcgcacttgtaattccagctactcgggaggctgaggcaggagaattgcttgaacctgggaggcggaggttgcagtgagccgagattgcggcactgcactccagcctggtgacagagtgagactccgtttcaaaaaaaaaaagtataaaaatctgaagactctagtggtataatctaattaagtttctatgaagcacatgattgcagtcatgtcaaagcagtttctatgagcacactgttatctgttaaaaaagcaaacaaggctgggcacagtggctcaggcctgtggttccagcactttgggaggccgaggcgggcagatcacttgaggtcaggagtttgagatcagcctggccaacatggtgaaaccccatctttactaaaaatacaaaaaattagccagatgtggtgggtgcctgtaatcccagctactttggaggctgaggcaggagatttgcttgaacccaggaggtagaggttgcagtgagccaagatggtgccattgcactctagcctgggtgacagagtaagactacatctcaaaaaaaaaaaaaaaaaaaaaaaaacaaggaataataataaattaaccttagcttactggatgaccaccatcatatatgcagtctgttgtttaccaagatgttgttatgtggtacatggctgtattttattgttgtattctacagtgcataataaatggtgagattctcctcaaagagtggcagagaaaggattcaactccattttctctgactccagtgcctgcgcgaacattggagactttgctgtcatgagcgtttctcacgtacaaatgcaggcaacagtgagaggaagttgtcttgtttttgaacaggccttgtttttcttggatgcttttgcttaaaatccaacagccaaatgaggaaactgtaaaagcaaaacaaacatttttattgcagatgaacccacatactgattttggcttgatctcttgaaacagcctaaatgtctcattacaaagaccttagaaattctttcataaaatctgaattggaagagatcttggatatataggttttatttcatctaacgttttacatggattgttgataaatggccatctggcttttatttgaatgcctccaaagacagaggactcactactgccatatgaagtagctcattccatttggcagacagttgagattgttagaaatttatactgcacctcccctgggcctagttaaattctttggagaagtgtagagaaaaagtatttttcttctacatgccagttttttttttggttttgtttggttggttgtttgttttgtttgagatggagtttcgctcttgtctcaggctggagtgcagtgatgcaatctcagctcactgcaacctctgcctcccgggttcaagcaattctgcctcaaccaccggagtagctgggattacaggcacccgccaccatgcccagctaatgtttgtattttttagtagagacggggtttcaccttgttggtcaggctggtatcaaactcccaaactcaggtgatccacccgcctcgacctccaaaactgctgggattacaggcgtgagtcactgcgcccggcctacatgccggtctttcaagtgttcgaagagccttcttaggtctcctctggccttctcttctgcaagctgtgcatgcgctgagttctgaagtggtgccacaccacagcctaccatacaacgtcactgcatgtggcataaactgggaccacagaactctgaaaccggaaatcagggtagctaacacttgtttgctaacatttcacatacattatctcctttaaaccctaacaacacagtgagacagttactgttatctccatgtcagatgacgagactgaagctacaagatcacagagctggcagtggtagaacccagatctgtctgactccagagcacaaactcttagaacatgggatttgatctcattttatagaggaagaaactgagccccagagaagcgacctgcccaagggcaccagcctgccagtgggtgaactaggactagaattcagatctgcctcccagaacactggccctcaccgaggctaggggagtctgttggcaggctgctgatgtgttttcctagtttacttttttttttcttttttttaatatatatattttttgagacagagtctcctcactctgttgcccaggctggagtgtagtggcaagatctcagctcactgcaacctccccccaggggttcaagtaattctgcctcagcttcccaagtagctgggattacaggtatgcaccaccacacccagctaatgtttttgtatgatttggttttgttttgttttattttgagatggagtctccctctgtcccccaggctggagtgcagtggcacgatctcggctcactgcaaccactgcctccccagttcaagccattttcctgcctcagcctcctgaatagctgggactactggtgtgcaccaccacgcctggctaatgtttgtgtttttagtagagacagggtttcaccatgttggccaagctgttcttgaactcctgacctcaagtgatctgcccacctcagcctcccaaagtgttgggattacaggtgtgagccacggcgcccggcctgttttcctactttaaaagctggctctccttgtgttgttgaacaagcgtttgttgggcccttactgtgtctctagaacatttatttgaaatcagaagtaggggtgataccactgtgacaagagtagatttttaaaacttcgcgtaaaacagcaagagggactcaacacattttgttatgtttttgtaccaaaacagtagtgtttatctttcttggcaataaaatcattttaaaaaataaactgcaaatactcattcagaagccaatggatgatcttcagcacattgcagttatttcagaactcggcctacatgcttaattcgatcactctgcttcactctcaaactttcattgtaggcattgcttccccactcaaacctttgggaatttcccatttgcctgaaggatgaaattgaagtggctctagccacctttcagccttttcacacactgccgagccaggttgctcatgctgcttctgttcttgcagatgctccccacctgcccccctcctcttgcttggaatgccttgcacttcctgctgcttagccaaatccaacacaactccatgctccattgtccccgacctccctatgacctctccctcctctcattccagcagctactgccaggattgcttgtttcgtattttacattatttgtatttatttattttttgagacagagtctcactctgtcgcccaggctggagtgcagtggcgcgatctcagctcactgtaacctccgcctcccgggttcaagtgatttttctgcctcaggcccctgagtagctgggattatagtcacgcaccaccacacctggctaattttttatatttttggtagagacgtggtttcaccatattggccaggctggtcttgaactcctgacttgaagtgatctgtcggcctcagcctcccaaagtgctggaattacaggcgaccagccagaattagtttaagaagtgcatgtcagtgagcccttgtgttttgcaaagcatgaaataaaatccatggtttattaaactgaaataaagaagggaactgtctattcttttaatgaaagcagaagacacgtgaaagattgtgttataaactgaagttttggccgggcatggtggctcacgcctgtaatcccaacattttgggaggctgatgtgggcagatcacctgaggtcaggagttcgaggccagcctggccaacgtggtgaaaccctgtctctactaaaactccaaaaattagccgtggtggcaggtgcctgtagtcccagctacttgggaggttgaggcaggagaatcacttgaacctgggaggcagaggttgaagtgagccgagatcacaccattacactctagcctgagctatagagcaagactctgtctcaaaaaaataaataataaactgaatttttgtaaataagtatctggtgaggaccactgtaaactgcaggaggataggagattagcatatctggctccttgagacccataactatattttatttagaattatctctctggtacttcacatcgtgtcacaaattaggtaatacacgtagtggaatgaattagcaaatgatgagtgcattttcataaaccttcggaggatgagatgggtgcccttggggggtggtgagtgctccctcccagaagtgccaggcgtggtctggccaaccagcgaggcagtggctgagctggctttaatgtctttccaatcctggcagtcagttctatgaaattcaatgagtatttaaaatgtcttgttggatggtttgcaaaaaaaaaaaaaatcacccctggatttatcagcttagcaagtttgcatccttgcctctttaatggatatttggctttcaactgcaagctgagaatggtacactgccgaataaatggtcctactcaactgcgagaaaacaagtcagaagatttctgggggtggggtgggggtggaataacttttctctagtaactgtaaccaacgcatatgtggggtgtctttggagccaaaagacatcacatttcttcttttctatgcattagttctgtcattttgggcaagttacttaatctctctaggcctccatttcatcatcttcaagactgagatacttactttttttttctcttttgagacatagccttgctctgtcacccaggctggagtgcagtggcgcaatctcatctcactgcaatctccatctcccgggctcaagccattctcctgcctcagcttcccaagtagctgggattacaggcatccaccaccacgcctgtctaatttttttttgtatttttagtagagacagggttgcaccacgttgaccaggctggtttcaaactcctgatctcaagtgatttgcccacctcgggctcccaaagtgctgggattataggcatgagccaccgcacctgggcgacatacttacttttatgcagggctgttgtgaggataaaatcaggtaatgtggaaaagcacctagcacaaaatcagaaactgtaggcttgcaatatgatagctcttatgctcacacattcccttgtggttggctaaatccctagtaataaactttcacattcatgtggcggtttgcattttacagaatgttgttacagacattattacctcacttgatctttaaaataacccagtgaagtagcacaaagattactactcttatgttaccagtgagagaggtcaaggaacttgcctacataatacatacattaatatataatacattacataatacatgacattacagaatgatggccaacatcgggtttcctcattccaaattcacactcgttctagtttacctgttgctgcaatggctactgatggggttcgtcagatttccttaatttatccagcaaatattttttttcagagacaggatctcactctgtcacccaggctggagtgcagtggcatgatcatggttctctgcagccttggcctcctgggctcaagagatcctcccgtctcagtaatccccaaagtgctgggattacaagtgtgagccactgcacctgacctatccagcaaatatttattgcaactcaagtgactgagctggagatttctcctgtttgtgctgtccttggttgattagcatagtacttggtatagaatagttattcgataaatacctgaggaatgaatgaatagattaaaccaattttccgagtcttttcgatagagtaccttgattctgctaaataggcaagaacacttgcaggggataaagagagattggctgttgggagaagccaagagctgacagctgcagagagaagctgatgaagtcagttacacgcaacaacacggatgattctcagaataatcatgctgagcaaaagaagccagaccaagggcagtacgtgctgcatgattccctttgtgtaacattacagagggctgggcacagtggctcatgcctataatcccagcactttgagaggccaaggcaggaggattgcttgaacccatgagttcgagaccagcctaggtaatacggtgaaaccccatctctacaaaaaaatacaaaaattagcctgccatggtggcctacacctgtggtcctagctactcaggaggctgaggggggaggatctcctgagcctggggaggttgaggctacagtgagccatgatggtgccactgcattacggtgtgggtggcggagtgagaccctgtctcaaacaaaaaaattacagaaaatgcaaaccttagtgacagaaagtagttcagtggttgcctttgggtgggaccaggtgggtagggagggaggaatttcaaaggagcaggaggaagtgtgtggaagtgatgggtgtgctccttgtcttgatggtggtgatggtctcttcagtgtataaatacgttaaaatgtatcaaattatatacttttgtgataccctaacttgtattaacttgattgactctctcttagctaagaaagccggagggattccattcggctccttcatttgcaagacgttaagggctccttacccacccccttcctcaaggacttaacttgtgcaagctgactcccagcacatcaaagagtgcaattagctgataaggtactgtggcaagctgtgtccgcagttcccaggaatttgcccgggtgatagtactctagtgcccctgcgtttgtgtccggcagatagcacccagagcccccgcacctgtcaccttgtgatggctttaaagctcctgcacctggaactgtttgttttcctgtaaccatttgtctttttaacttttttgcctgttttacttctgtaagattgcttcagctcaattcccgctcccctttctaaaccaaggtataaaagaaaatctagccccttctttggggccgagagaattttgagcactagtcgtctctaggtcgccggctaataaaggactcctgaattaggctcaaagtgtggtgtttctctgtaactcacttggttacaacactttaaatatgtacaattgttttgttttgtttttgaggcaaagtctcgctctgtcacccaggctggagtgcagtggcatgatctcagatcactgcaaacttcgcttcccaggttcaagtgattctcctgcctcagcctcctgagtaactgggattacaggcatgtgccaccacacccagctaacttttgtatttttagtagagatggggtttcgacacgttggccaggctggtctcgaactcctggcctcaggtgatcgccccacctcagcctcccaaagtgctgggatcacaggcgtgagccaccgtgcccagccagttgtaagatcttgataagtcatgtctccactcttagcatctgtcaaaaaaggggttggactccaaggcttgaggtttcttccagcttttgcattgtggggttctgtcacccgcatgtcagactatttggctacgctgaggactgcagatagggggaggggaagtgtggccagtgaaagctgtctcatccctgactctgaatgaatttgaggtatcagggaaatggtgacctttaccacctccccgccaccctcccccacacacatgcatatcatggatttgtttctcctctagttcctcctgcaatgctccttactccatttttgtttttgttttactcataaacagcaagtcaacatatatactcaggtatgtttttaagttcatgcactcaaaatctatcacgttaataggtgaaaaatcttaccttccagaaaacttggtcatcaaaatatttagcctcatgaggtgctttccatattttaagatttaggagcaaacctgtttaaatgcataatttaatgttaaaagatttggagcacaggatttttaatctcaagattaatcgaaatattgtgtgtcaaaacgacagtatctcaacagaaatcctttttctcccacaattgaaagacaaataaatggaagccctgtcattcctggaccagcttaattctgtagcctattttattttattttattttattttattttatttattttgagacagagtctcactctatcgcccaggctggagtacaatggcgtgatctcggctcactgcagcctctgcctcccaggttcaagcgattatcctgcctcagcctcccaagtagctgagattataggcgcctgccaccacatccagctaattttttttttttttttttttttagtagagatggagtttcaccatgttggccaggctggtctcgaactcccgacctcaggtgatccacccacctcagccttccaaagtgctagtattacaggcatgagccaccacacctggccgattctgtagacattttttttttttttttgaaaaaaagaactgggaatggcagtgtactgagcagtacatgagagccacagatctgacgcccttccccagatggagtaaaagggccccacgaaagctgatccatgtaagacatatgggctactatggagggtgactccaattgggtgctcctataggtctgtcttctctggctccagtcaactcctgggaacctcagcttaagattccacttgtgtagttaggaaagtagcttataacttgcttaagtgcctgtccttccttttccccatctttttaagtgtctttgattttattttttatttttgggacagagtctcattctgttatccaggctggagtgcagtggcacaatcacagctcattgcagcctcaaactcccggggtcaagcaaccctcccacctcagcctcccaagtagctgggaccacaggtgtgtgctaccatatccagctcagtttttggtattttttgcagagacaggacttagccatgttgcccaggctggtcttgaacacctgagctcaagtgatctgcccgcctttgccttctaaatggctgcgattacaggtgtgagccactgtgcccaacctccattccctgtctactctctgcccagatagcttggccatatgtattcctccagcttcctgaagttggatgaatttcacaggacacatggaatgagtgcttcctttcacaggaagcaaggaaatgctcctgatagatttatctgtgtattattaaggatgatcagttccagtgtcgttaacaagaatgggcgagtgcttagtgagattcgtatttccctttcgtggtgctgcttttagctgatattggcatgcagggtacaaccagcatgacgcagttagcttgaattactcagtaacgatctctggcgcctgcatgaattttccagatagctgaggcttactcatcactgaggaatatctgtctaaaatatattttgtcttctgagacaacattaaacatatttagactttttttaaaaaaaatcagaaccatcactaggaacacccacttataacgtgccatataacgtggaaaaggtgtgtagctgtggagggttgttgttctaatctctcagcagcccaagcgttttgtgttcttgtgtccagttttaagaatttgtcggccggtcgcagtggcttatccctgtaatcccagcactttgggaggccaaggtgggcggatcacctgaggtcaggagttcgagaccagcatgaccaacatggagaaaccctgtctctactaaaaatacaaaattagccgggtgtggtggtgcatgcctgtaatcccagctactcgggaggctgaggcaggagaatcacttgaacccaggaggctgaggttgtagtgagccgagatagcgccattgcactccagcctgggcaacaagagcaaaactgcgtctaaaaaaagaaaaaaaaaagaatttctcttcctctgttaggctctttgctttcacttctaacttctgctggtgtactttacctctagaaacctagcccacctctaatctgctatttctaatctacctgggctgagaaacccaataactatgcttgataggattgtttcttaaataaatacagacaggcccatagagggctcaattaacaaattaaatgcttgtcttctgggagtccatttggtgcaattttggctgcttgaggaactttttcccccttccattgtccaagttgttttgtttccttttttgagacagggtcttgctctgttgtccaggctggagtgcagtggcatgatctcagctcactgcaacttctgcctcccaagctcaactgatcctcccatctcagcctccagagcagctgggactacaggtgtaccaccacgcctggctaatttttgtatcttttgtagagatggggtctcactatgttgccctggcttgaactcctggcctcaagctattctcccacctcagcttcccaaggtgctgggattacaagtatgagccacccaagttgtttttaatcaccagtttgctcatgtcaaaaacaacatgtaaagaagaaaacttgttggtcttaactcttaaaggaacaatatgattgtcttttcctctattctcttttttgactccagtgaagaataagaaaagacctcctggtactttgcaagacagagggcaagtcagcaccactttgaacataccagtgataacagtgaatagtgtgagtcccaggacagggttgccaaataaaatgcaggatacccaattcatttcaaatttaaaaacagacaccttgcatttttgctaaatccggcagcctttcccagggttggattgccagctgccacgaactgaacgttaacttacggaattaacgctactccgcctctgcttcttcacaaagactctgcaaaaagctaaggccagacatggtatattaaagcaattctagccaatctcacactcaaaaattacccaggtaactccaaaaagtacctccatacagtttgttaaagctggaaggaagccagcttagttaccataatcctttcattttacagagaagctaaccaaggctcagagggagtaaagtgacatgcccaacgtcacacaactcatagtgtcttacgccatttgtctcttatttggcattcacctcctgcttagggacacatatatgggtgtctaaccaataaaagatgtttgcttgtagaataaaggtgaacagttctggatggaatgtatattttctttcttttttttttgagacagtctcactctgtcacctaggctggagggcagtggtgcaacctcgactcactataacctccacctcctggggtcaagccattcccctacttcagcctccccagtagctgggactacaggcacacgccaccacgcctggctaatttttgtatttctggtagagacagggttttgccatgttggtcaggctggtctcgaactcctgacctcaagtgatctacctgtctcagcctcccaaagtgctgggattacaggcgtgagccactgcacctggcctgaatgtgtattttctttttttctttttttttagacagagtctcggctcactgcaacctctgcctcccgggttcaagcaattctactgcctcagcctcccaagtagctgggatccaacaccacgcctggcttattttttaatttttagtagagatggggtttcaccatgttggccatgctggtcttgaatcctgatctcagatgatctgcccacttcggtctcccaaactgctgcaattacaggtatgagccactgcacctagccacatattttcacctggcatataagtaaaactggctaattagcaactcccctagattttttgctgttctattttattgcaagaacagaaacatacttttcccctttgttgaaagatctccagtggcttcccatcttttataagggcctgctcctcactaccattctgccctcaacccctgctgctccttctcactccattcacaccaaccacactggtctccttactgttccctcaacacacaaagcatgctgctgtctcagggcctttgcacttgctatcctattttcatggaatgttcttcccctaactaaatgcatcgcatatctccctcctcttcattggggtctctgcttaaaagctaactactcagataagctttccctgaccacccccctaaaagaacaccccatcccacattgactctatgtttctctagtttgctctgtcttcacagccacttcttcccatctggcgtagtagacacttatttgtctatttattgctaataccttcccccactagaaggtcaattccatggggtcagggaatttgttttgctcactgctgtgtccccagtgcctggctcatagtggatattgaataaatatctgttgaataaaatagtattatgggtgtcctcagaaataaaaggtaggcttttgggtgtaaggattttctcgggcttctgtgcaaaactgagtgtgatcaccagccctgggttcaaaagtctgcaacgttgccactcaccctacttataacctcagggatgtcccttccctgccctggcctcacagtccacattagcagcaggtgacctctaagaacctttccaattctgaaattatgtgatcctcagggaaggagatggggcacatagacatccagccacacggcagggtgcgctctggacgtgggtgctgtgtcctggcaatggtggaagaaaggtggcctcacactgacctgtcaggagaccagacatgagagctatcacgatggccaagctgagttccccaatgctgaggaggacctggaagccaatcctagaaatgacaaagcagaggtggtcacttgggcatcaggcagcagaggtcatcagggacaaaaaggactgtcggtgtcagtagtgccattgccaggaagggccatgaggaaaacaagggtcctctccctggctggtacattcccctggcattttcccaaaaagccacgcagacatgtgggagggagggaggcgacggagattccaagattgtggcttattttagttcccagcacctcatggataatgaaccagaccaggagtcagaaaacccaagctcaagtcccagctctgtcacttactagctgcaagaccctgggcaagtccctcaacctctcagagcctccagttttctctctctctcttttttttttttttttttctgtttttgtttgtgagatggagtctcactctgtcgtccagactggagtgcagtggtcggctcactgcaacctctgtcccccaggttcaagcgattcttgtgcctcaagtagctgggactacaggcatgcgccaccatacctggataatttttgtattattaatagagacggggtttcaccatgttgaccagggtgatctcgaactcctgacctcaagtgatctgcccgcctcggcctcccaaagtgctgggattacagacatgagccaccacatctggccagccccagttttctcgttaggcaattaaagatgaaggttctatttctcttggggcaaggtgggtggggtagagcttggctttcagacccatctcccctgcccatccctaccccttgaacatacttccacgacctctctccttcaaggcaaccccaggggttcaattcaaacattaagctattacgggggcccttggatgctgaatgtgattgtcccagggttcagcctgcacctgggcactgccagcccgttcactgcagccccacggatagttgtacataacaagccagttttttaagcctttcctgtttcttgtctcaacaggtgggcagctcatgttctcatttttaagacaaagcaaagctccaagcctgcagcctcatggggtggaccccaccttgtatgtcatttggttatcttccctgtctttactgattgttcattataaagtgggagaaataatgacagtccctacctcataagatcataggagagtggagagaattaaaaagaattacctgcagactagaaaaataaattaaggccgggtgtggtggctcacacctgtaatccccacactttgggaggccgaggcgggcagatcatgaggtcaggagatggagaccatcctggctaacacagtgaaaccccttctctactaaaaatacaaaacattagccgggagtggtggcaggcgcctgtagtcccagctactcaggaggctgaggcaggagaacggcgtgaacctgggaggtggagtttgcagtgagctgagatcacgccactgcactccagcctgggcaacacagcgagactccatctcaaaaaaaaaaaaagaaagaaagaaaagaaaaataaattaaaaagataaaaagagttgccaccctgctgctcatgtagggagtgcagatgtcaacaactacctgcccaaccattcaggcagccatccccccttccgtgtggcaagctccaggccctcatctttgccatctttgtatatcttcaatagtttgcttcctccccagctccaaacacagttcaggttatcaaaacctcagggaaatatttgttgaatgactgaaaaatgtagtcaattactcaattcattgatctaataataagtgatttttaggaaaaaaatcagggggacatatgcatgaccttgcaaaaaaaatttttttttgagatggagtcttgctgtgtcaccaggctggagtgcagtggcgtgatctcagcctcccgagtagctgagactacaggcaagagccacaacgcccagctaattttttgtatttttagtaggcacagggcttcaccatgttggccaggatgatctcgatctcttgaccttgtgatccgccagcctcagcctcccaaagtgctgggattacaggtgtgagccaccgcgctggctgcaaaaattcttaaaaaggacataaaagaactaaacataaagggaacaatgataaattgggctatattaaaattaagaacctctcttgttcaaaagacaccattaagaaagtaaaaggtgggctgggcatggtggctcacacctgtaatcctggcactttgggaggccaaggtgggccaaagttgaggccaggagtccaagatcagcctgtccaacatggcaaaaccctgtctctaccaaaaattattttgtctatacagaagttagctgggcatggtggcatgcgcctgtaatctaagctactcaggaggatgaagtatgagaattgcttgaagctgggaggcagaggttgtagtgggctgagatagcgccactgcattccagcctgggtgacagaaggagactctgtttcaaaaagaaagaaagaaggaaaaaggtaacgcacaaagtgggattcatatccaggatacgtaaggaattcctacaaatcaataagaaaaagacagaacaccacaatagaaaatgggcaaactaacttgaatagacatttcacaagaaaagatattcaactgtccaaaaagcatattaaaagtgctccatttagttagttattggagatatcaaaatgtaaacaataggtttgattgctaaatgactaatcaaaaagaaggaaaacaccaagtgttggcaaaatgtggagtaaaaggagcttctatacactactggtgattagattggcgcaaactactagagaaaattgtttagcagtagccactaaagctgactgtgtgaatactgtataattcaacaatttcacttctaggcatataatcaacagaagtgcattcgtgtgctccaaaaataaaagtgctagaatgttcataggagcaatactagaatattcataatagctccaaactggaaactacccaaatcctcctcaataatggataaataaattctgctgcattcacacaatggaacacttgttccaactatcttttcttagattctctatttgcctatctggcattcatttatgacagggccacactaatggccaaagttgtttatctcattttcttgcaagtcagctttctcaggcataggaaactcatattataaacccctcagctacaaattctaacatatgtgttttcacttcctgcccattagtggatgccctcacccagttactctcccaccactctttttcataaaggcatagtcccagttccccctctctttctgctgcctggtccctggatgatacagttttgtgtggccctgcatgacgtgttctgcctcttgtttacaggggaactgtgaacaacaaaactttccttccaataatactggaagaaaatgccactcagtcacctttataaattaagacccaagcatgacagaacactatatcccagtggaaaaagggtacagcaatgcttaacaacctggatgaatctcacaactacaatgttgagtaaaagaagcatacaaaagcacagacttactgtatgattccatgtatattatctcagttcattttctattgctataacagaataccacagaatgggtaatttgtaaaataagtatatatagctcatggttctggaggctgggaagtccaagaacatgctgctggcatctgttgaggaccttcttgctgtgcctgccattacatggcagagggtatcacatggcaagagggcaagagcatgtcagctcagttctctcttcctcttgtaagccaccagtctcatcataggggccccaccctgatgactttatctaatcctagttacctcccaaaggcttcacctccaatttcatcaacatatgaatttggagattaagtttccaacacatgaaatttgagggatgcattcaaaccacagcatcctgccccagcccccaaaatgcatgtccttcttacatgcaaaattcattccaatagcactaaagtttttttttttttttttttttttttttttttttttagagatgggattttgctctatcatccaggctggaatgcagtggcatgatcatagctcactgcagcctcaaactccttggctcaagtaatcctcctgtctcagcctcctgagtagctaggactacagatgtgtgccaccatatccagctaagtttatttaattttatttgtagagacagagtctcactctgttgccctggctggaatgcagtggcacgaccatagctcactgcagcctcaaactcctgggctcaagtgatcctctcacctcagcctcctgagtagctagaattacaggtatatgccacaatacctggctaatttttttatttttattttttgtagagacaggtctcactatgttgcccaggctggtcttgagctcctgggctcaagcaatcctcccacctcaacctcccaaatcactgggattacaggcatgaaacaccacacttagacaacccccaaagtcttaacttgttccagcaccaactcaaaattccaaagtccatggtctcatctaaatcagatgtgggtgagacttaaggtacaattcattctatgggagattccctctggctgtaagcctgtaaagtcaaaacaagttattgacttccaaaatacaacagtggaacaggcataggacagacattcccattctaaaaggaaaaagaggcaagggaaaaagggtaactggttccaggaaagtacaaaacccaacatagaaaacaacattaaaccttaaaccttcagaatgatcttttactctgtgtgccacctcctggacacactatggaatttggacccccgaagcttcggggagctctgcccctgtggttttgctgggttctgcccatgttgcacttcgcacaggttggagtctcatgcctgcagttctcccaagctggcattgcactatgatagctctaccattctggggtcttggcggtggccccacccttgtagctccactagaccctgctctactaggggctctctggggtggctgttcacagcaccctttgaaatgtaggtggaagaaggcatgccccctcagcttttgcattctgcacacctgcaaaattagtgccatgtgtatgctgccaaggtttatgacttttaccttccacatcacacctgtggccacctgaaccacagctgggatggctgaggaatgctgcaccagaaatgtggggagcagagacccaaggcagccctgggcagcagctggtcattccaaaccattctgccctcttagagctctgggccagtaatgggaggggcagtcttgaagatctctgaaatggctttggagtttttctcccttgtcctgatgaacagcctctggctttgttctatgtgtactaattttctttcttccttttttttttctttttgagacggagttttgctctgtcgcccaggctggagtgcagtggcgcgatcttggctcactgcaagctctgcctcccgggttcatgccattctcctgcctcagcctcccaggtagctgggaatacaggcgcccaccaccacgcctggctaatttatgtgtactagttttcttatcagtcggtagttgtgtcacactctcagtgttctcagctgaaaatgttctttcattccctacaacatggctgacctacagattttctgccttccataaatgactctggcacagaaaaagttcagctaagatctttgcttctttataaaaaggatgacctttgctccagtttccaacacgtggttcttcagttctatctgagacctcatcagaatggcctttaccagccatatttctatcagcactctgatctcaacgacttcagtaaccattaagaagttccagactttccctagttctggggtcttcctttaagccctcaccagaactgcagaactgtctttaatgctccattctttttctttctttttttttttttttgagatggagttttgctcttgttgcccaagctggagtgcaatagcacgatctcagctcactgcaacctctgcctcctgggttcaagtgattctcctgcttcagcctcctgagtagctgagattacaggtgtgcgccaccacgcccagctaattttttgtatttttggtagaaacagcgtttcaccatgttagctaggctggtctcgaactcctgacctcaggtgatccacctgctttggcctcccaaagtgctgggattataagcctgagacaccgtgcctggcataatgctccattcttgacaatacaggctttttctagcctgctcctcaaaactcttccaacctattcccatcacccagttccaaagccacttccacattttcaggaatctgttacagtaaaaactctacttcttgcattaattttctttctttgtccatattctgttgctatgacaaaatatcaaactgggtgattataaagaaaataaattgatttagctcacagttctagaggctgggaagtccaaaagcatggtgccaccatctggtgagggccttcttgctgcatcatgacatggagaagtcatcacacagtgagagggcaagagcatgccagctcagatttctctttctcttcttataagtcaccagtgccatcatacctcaccccatgaccttatctaatcctaattacttcccaaaggcccttcctccaaaaaccatcaacatatgaattgaaggattaagtttccagcacatgaaatttgggggacacattcaaaccatcacatatataatgtacaaaaacagacaaaactgactgatgctgttagaagtcaggttagtggttatcctggaatgagacaagaagaggttctgggtgttggttatgtggggatatcagaagattcatcaaatggtacttgtatgatatttgcacttttctggatatagcttatactatataagttgggttttttggggtttttttaagtaataagtggcagaatagaggataaacccaaacctgctgactgccaccccacaactcattctatatgatgctgtctggaaaaagaaatgaatgaagcagaaatccatcaccatgataacagtctccctgcacagggtctcccctggcgagaccctcagctcaacacatgtcctcacagcagccctgtgagtgagctattagtgtccctatttcacagagggcaagttcaggttagggaagtgaaccaagaattccaatgttttgtggcttggactgggtggctcttgggattcaaactaggcaggcctgtccacaaagcttggccagatgcttcccagatttcagcatttgaggacaacattcatgaatttagccatactggcattccagagatgctattaaaattttttttctccaaatagacttatttttacatttaaataattgaatttaaaagaaaactgagttactagcttgaaatagaagggaaatgggaggtagctgtaaaaagagatacaatgaaaacaaaatgttgctaaaatctctcccagatatggcagtctgaggttttctctgctattcaaaagagtggttaacaagagctagaagggtgcagagattctcaggccaagtggggactttcttttctccctgacgtaatcaaaggactgagaattgaaaaagagtatctgcaactgcatgattcagtgccatttcagtgtgccttcccattacttaaaaatcccacagtttgtgggaaatgctccatcctggttctgatcacagcatctgactcaatcacatatgctcatctgaataggaaattgggaaatattgtttgtggaattaatgcaaagtcaactgacttgcccaatgccaccaagtagctaatccacagttcccattaagtgttgtgactttgcgcttaatcctctctccatctttccattacatagagatgtcctcatacggatgcagcatcagtcatcataaagaacggggctatgttctgttgctaaatctgcacagcaaccctgtgacataggtcttattttcccattttacagatagaaaactgagatttagagagtttcagtaccaggactaaggctgcatgactggcttcaccactggtgaagcccacgccttttactctcagcaaaccaaagacttccggaagagagatcatcactgtcactatgcccttccctttgcctgggtcctgcaaaggcaagaggataactgcttcttggtcctcaactcactcaccctgatgagagttgacttgcagggatgtgctggagccagttcccataggctcagtgggctgattgttctcatctcttcccaagtccatgtatagtgatgtctccttgacagcttgaactcagtcatgcgggaagcgtttgtaccatagaaattgcaagtgctaccaatcaaggctttattttcttggaaagccagtttgttaagttaatcctttaccagaaaaccactgattggctttttcttttttggctataggtcagtggttctaaaacttgagcttgcaagagaacacttgtggggcttgttcaaacatggactgataggtcccacccccagatttctaactgggtaggtctggggtggggccgtaggtagggcttgcatttctaacaagtttccaagtgatgcaggtgctgtggagaaccaatgcttccagagaaccacagaatcacagaattgggaatctaggcagcccacaagcagaatttagccacacagtgttactaacaatcttgaattttctgccagtacttgggagagcacatgcaaaactctagattttgagctcttgagaagtcattggatctggcaacactgagcctgggtccctgcactgtgatgatgggtgcaagctgaagagctcccttccttcactggcttttttttttttctaacttcccctgcctgttctctacaggcatgtgagtaggaccttgctaggtcaagtcctcatctttcagaggggaactctcaggcccagagacaggaaaggttctgcttagaattgcacagttattaagacagtggcagacacatcactggaacccatcacagaggcgccttgcttcacacagctcatcccctcctcatcccaagcaaggatgtctcacccactgatatgtgatccctataatttggggctatggttgtctctgtagaaggcatccaagaaccggtaggaaccgcagcgcctccatgatttctctgagacacgtccaaacgcatcagctcctcatcacctgcttcagccatttttacagccaggttccagccgagtgaccttgggcagataacttctcttaaatctcatttcttagagtctgagaatacctcagtaggcggttgtgagaattcaaggagataatgcatataatggtttctagcacaatgcccaacacttttaaagcagtcaataacagtagtaaatgttatcagtgaatatgattatcatcatgctaccagttcatctctaaaaatctatccctgtatcgtgcccaattcactttttcattttatataagccatgtccagaaaatattcacacaacatccaggaagtaatggctagggctctggtgtgtcaaactgaccattgctgtccactgtctaggggccacaggacctacctctggtctggaggcccacattcccacctcgcagtgagacctcagccaaggcccacccctctctgggcctcagggatgggttgtgcttagcatgtccctgcattagcttattaaatccagtagcatcccaacagtcctgtgaggggagatagtatcattatctccatttacaatggggcgactgaggctgagaaaggttaagccacatgcccagctagtacgcagtgggagcacgtccacagcaaagctctgcatcacgacctgaaccacagtctcaattggcttgggcctatttgacctgctctgtgtttgtgggatcacaaaagatttcgtgtctttggtctatacctaggtggccctatttggaaagaagaggtggcctggagaggtgataaatccatccaaggtaggggctggacagaatttctgaataaatcagccaacaaatattcaccgaagcctactgagcacctggccccgagtgcacacgccccagctaaggactctgcacacatttcttcctgagttggaggggagtgttaaggggatggggggtaagcccagtgacccacatgccattgccggctccgacggtatcaagcaccagcagcacaatgtagatgatctctccaagcagacccagcaagctgaagttgtagcccatgatggagctgtggggaatccccagcactcggttacaacacccctgtggacaagtgttattataagcagattggcaggtgagacccatattccctacccacccctttcacacacccttggtatccggggccaccaaagggggatgggcactaaggctcacctcaaagaagcccttctcagacttgaatgtgcactcacatcatcggggagtttgttgaaatgaagagctggctttagtggatgtggggtggggtctaacagcatttctaacaaggtcccaggtgatgccaatgctgctggtctacggaccacactatgagtagcaagggtctagtgtagacactgttcacaatttcagctgataattccttgtggtgggggctgccctgtgtactgtaggatgttaagcagcatccctggtctctccccacgagctgccagtagcagccctcaccccactgtgtcaaccaagaacgcctccagacattgtaagatgtcccctggggggtgaccaagacccactggtctagcccaaatttaagcaccatcccaaagacaacacagctggttagaaagaaagcatgaggccacaccttcagatccctactcagtaatccttcctccccatcactcagcctcccacacagccgtgagccagcagatgtggacacatatgcaaattcaatcaggctggttccttccttagaatccctattagtcttcagaataaaaatccaggttgggcacggtggctcatgcctgtaatcccagcactttgggaggccgacatgggtggatcacctgaagtcgggagttcaagaccagcagggccaacatggtgaaaccccgtctctactaaaaacacaaaaaattagctgggcgtggtggtgggcgcctgtagacccagctactcaggaggctgaggcaggagaatggtgtgaacccgggaggcggagcttgcagtaagctgagatggcgccactgcactccagcctgggcaaaagagcgagacaccgtctcaacaacaacaacaacaacaacaacaacaacaacaaaatacatacacacacgaaaattagccaggcatggtggtgggcacctgtaatcccagctactcaggaggctgaggtaggagaatcacttgaacccaggaggtggaggttgcagtgagctgagattgcaccactgcactccagcctgggtgacagaatgagactctgtctcaataaataaataaataaataaataaataaataaataaatatccagactcctcaactagcccaggaagtgtgcctgagcacctcccatctttcagggatctgggtccaccatgctcctgggtggaccctatgcctttagaatgtctgtttcctggttgggccacacactcttcttaacaataagctttcatacacactgtgccttctgcctggaatacattccccatgtctctgcctggctaatactacttctctgtcaacacttggctgtcaaccgtttcctctgctccaggaagcatttccagacccatcccaggctagctcagatgtgccctcttgctgttctcacactgtattgtgtgtatccatttcgctcactaaactatagcttgaaaagcaagatgagtgttaaaacgtatgtgttgaatgaaggaatgatgaatgaatgaatatatgaatgaatgagcgaatcatttttgaatagtcctgccagtgatgaagtcaaggaaacaagctcagggaatgcgatgggcgctgagactgatgataacttgctatgtgttcttttttctgcccttcctcctttcatttcagggtttcaaagccagaggagataaaagaaatttgttccccttgcaaagatgaaaatcagatttgccctggttttggttaatcgaagtattgatacgtttttccttatttaattttattttttaattacctccagttccatccatgttgctgcaaatgacaggatttcattctttttatggctaaataatattccactctgtatataaaccactttttttttttttaagacagagtcttgttctgtcgcccaggctggagtgccatggcacgatttcagctcactgcaagctctgtctcccaggttcaagtgattctcgtgtctcagcctcctgagtcgctaagatgacaggtgcccgccaccatgcctggctaatttttgtacttttagtagagatgggtttcaccatgttggccaggctggtcttgaactcctgacctcaggccatctgcccgcctcggcctcccaaagcgcgtgagccactgcgcccagccagtttttcctaattttaggttggaatgcactccctgaatagcccctgttcatccaaatccagccttcgaaaatctactcctttttcctccatcaagtcttcaaacccatgaagatttgttgtccctaaatatttctcttagagaagcacattataaccaattggctataatgaagtattctggaacgatcaggatttgctgagtattggagaaagatccatccacttagaagaagaattaaacaatcagaagtggacacgacctggaccatcagcccagcactccctcttctgggtgctgctcctctcacatcatccacgtggttccccggcagcagccacatatgcacgatgtgcccacccccagctgaagacaacattatccaagttaaaccaaagagccccttctccagagaatttgggattggggccaagagattccatccaccaggctgctttcttgaagcaaaagactacaccccacaatgtggggtgaaagaggaggaagcatgtctatagagtaagaataaagcagatattcaggaaaagcaaagaaagaagtaaaacaggggcttcggggctccccacaacactccagtccctgtccttgagttctgtgacaccccagtagcctgataacaaattctccccaatgcccaagcaagctcaaatgggttctgccacctgctcccgagcatcttaacaaatgcgccaccgagccaggatggatccctcactaggcgttgaagccaataagagaatgcgccgacacctgcctaatgcagctgtgcactgcacagtggcccatcaggtcccagcgtcctgctggccttcagccaaagcagaggaggttagttgtctagtttcttaccggcaggtacttggctcccccgacggagatcagcccagccacaagacccagcaccatggcaagccacggagaagggatcaggtgacacgaggtacccacagccacgcctcctgccaacaccgcactgtgcacataagtctgcaaagaaatagcgtgtgggtaaaggaagcaaggtagagagagaacaccatcttgctgcaagtgaccagcacgctgggaacaaggcaaccctgtaacatcctccctgctttgctgatcctgaaaccacttctcccctgtgttggggctacgtgtccttcatcagtggacatgatgggccagctcactactgcctcttaggctcagggcacagttaccctgattgtgcagcatttagggaatgagctgggaagtccaggtgctcagcatcctaggcacccatcacactcattagtggtgtgtccctgggcagcgggaagaatgggtttttgttttattttttagagacagggtcttgctatgttgcctgggctggtcttgaactcctggcctcaaccaatcctcttgcctcagcctcccaaaatattgggattacaggtgtgagccactgcacctggcctagaagaatggggttttggatgtaccttcttcataaggttattgtaaggattaaatgagtttccacatataaagctcttagcccagtgtctggcatagaacatgaataaatgcccagtagacacaaatcattgttattgtttttattattattattggctacttggtgcctgtgccaccctgtgtgactgggcccagtttcaataagctgggccttgttcctgggtcatagctctgctatgtccttcactgctccagaaccggagccttgccttgctcttatctgacaccctcagctctcacctaggattagcctctgggcttccctgagttgacacccactcctgccttgctgggtgtcttagactttctgtcaccatggaactcatggccactcacttcctcttagcactgaattctgctgtgaagctgtcatctgtggccacattctttccactccagcccccccagtgcctcccacccgagccccaccactggtctgtccagacttccctccgacaccaccagctggagccccttcccccatcatcatgagaacttgttttgtctcccctctcacccatctctgcccacaagactcacacacaccatcgtctctctttactaatagcagcagctaatgtttgcctaccatttactccccgttaagcactttacatgcaccatctcttaattcccactttacagatgaggccactgagactcaaaacgttgaagtggcttgaccagagccacatggctagtgtcacatacttctctacttctgattctgatggttccattcttgaaatttgttggggggaagagagaggctggctaattctagtctagtctgttgctgctgactctcgctcatggtgactgactttagcaactagcagaaatggggttcaaactgaggtctgtttcatgttagcatggatggatttaatcactacccccagaaagcctttgatcactggacagtctcctgagtcccaggcccactgtgaccacccagcattctacctagagctccactgtagaggcaggcacagctccaccacccggcatgccctctcccaacccacgctggccctggggtggggaggggcataaatatgtgtgctagtcctgttagacccaagtgctgcccaagggcagcgccctgctcaccttgctgatcttcccttgggggtgagccaaggatgaccctgagatggctgtcaccacgctgactgctacagcatagtaggtgttgaacacggcattcttcctttcgattggacttctcagcagagcagagttgaaacttggccagaacatccacaagaagagggcgcctgggggccagagagggtggttggccagaatcacactcctgctccaaaggtctgagcctcgaggggttttggatgagaatcctagggctggagagtctcagccttgtcacttagagttagatggggaagtcacgtctcccctccgagctctcaagctgataccagctaaccacattttacagacaaggaaacaaaggccaagagggttgaaatctgcataccccaggcctcctgaacctgctctgtgaagtgcttaattcaaaggtatgaatttagcaaacactactcaaagaaatgaatcatgatggaagggcttcagacacccaggggaacttggtaaaggagggagattttttcagccagagccttttctgagccattctgctcagcccaagtaggagaccactcaccccaccttgtccttacccagcatggcagacaaactgggtatcgttgctgtctgatctttatcctccgttccctcgggtagaggctttggcaggcaccaggccacagacagcccaaaataggctgcgaacacgtagatgtgcatcatgttcatgtggtagtctgtctgcaataaaacccagtaagagcagtgagtgtcggcatcctctgcccggggcaagccctgatagtccttggagaaagttcagagcttcacttaggaggtgtgacttgaagccatgagactggtgttcagagcttacccagcccaacccagcaggctctgcccaggctggagtgcaatggcacgatctcggctcactggaacatttgcctcccaggttcacgcgattctcctgcctcagcttccctagtagctgggattacaggcatgcgccactacgctgggctaattttgtatttttagtagagatggggtttcaccgtgtttgccaggctggtctcaaactcctgacctcaggcgatccacccgcctcggcctcccaaagtgctgggattacaggcatgagccactgcgcctggccttttttttttttttttgagacagagtcttgctccattgctcaagctggagtgcagtggtgtggccacagctcactgtagtctccaactcccaggctcaagcaatcctcccacctcagcctcctgagtagctgggattacaggaatgtacaaccatgcctggccaatttttaaattttgtgtaaagatggaatcttgctatgttgctcaggctggtcttgaactcctgggctcaagagatccttccctcccaaagtgctgagattacaggcatgagccaccacacccggcctatcagtagctcttatatgcttttgaccaaggttcacttaggtgtggcaaaaacccacatggacacgcacctcactgattcctacttctcagcggaattttaactctgcgggagtgatgagtgatataaattttgcaacatgaagcaaccagacttcttataataccaaactaaggtcttcaggaaattctagatatattctaattttgcctgtaatcccagcactttgggaggctgaggtgggtggatcacctgaggtcaggagttcgataccagcctggccaacatggcaaaaccctgtctctactaaaaatacaaaaattagccaggcgtggtgatgcttgcttgtaatcctatctacctgggaggctgatgcaggagattcactggaacctgggaggcggaggctatagtgagctgagatgtcgccactgcactccagcttcagcgacagagtgacactgcgtcaaataaataaataaaataaaatgcaagtcagatcatgttactcctctgctcagaagcctccagcggctcccatgtcactcaaagtcaaggtccaggttcttgccacgaccctgcaggatccactctcacctgacctctcgggcgtcacctcctattgccctcctccacttgctcatcctcaaacccactagcgtgttcccactttgggtcattcagctgcctgaaatgctgacccccagccagggtgtaacaagggcagggtggagggagtagtccaccctgggtgcaagcaatcggggtgccttgtctgtagagggtgtctaagaattctaaagccaactaaaaagtctgtctgctttttatttgtatttatttatttatttatttttgagacggagtctcactctgtcgccaggctagagtgcactggtgccatcttggctcactgcaacctccacccgttgggttcaagcgattctcctgcttcagcctcccaagtagctgggattacaggcacccaccaccgtgcccggctaatttttgtatttttagtagagacggggtttcaccatgttccccagcctggtctcgaactcctgacctcaagtgatccatccgccttggcctcccaaagcgctgggattacaggcatgagccactgctcccagcctgtttttttttttttttttttttttttatcaccatgtgctgacaattctaaacagcgtggctggtaaacagccctcccagcaccctgccattgttctgccgctgttctcaggtacccatatggcttgtgcactcgttaccttcaggtctgtactcaaaaaatcaccctcttgataagatgaagctgcccctggccaccctctcaaacagttatcctctctccccaacttttcgtgtttcttttctccatttcatttttatctgtggtacttaccactctctaacatgctatatcttttgcctattttattgtttattggcagtctttccttctggaacagacgttccatgagagttgtattttccactgccacaagagtccctggtatatagtaaataccaaataaatatttgtgaagggaacaaatgatggtaaaaagccctcagtcatacataaagaggaaagtctatgcagtttcctgataagaactgaaaagcgggcttgtgtttttcatctctttgaactccaccaggaaggagttcaggaagaacacttggggattcttggcctggaatattcatttcttgagctggtgcactgaaatgactctggtccctggctctggttcccccgggccctcctgctgaagaaacccaggctgaattgaagttttgaggaaaatgaatactcaaaatcagtgctaagccctcctctagaccagttaagctagcaagtcaaagatgcagagaagagagatgatgttatatcaatgcagtcttttaaagcaatcgttatgaagactgcaacaaagcaggaagaggttcgggctcacagggagtgttctgcctctgaaatttactcctcttcttgacagccatgtttttactgtgtgaactatttcccatgccagctgtagctgcttggaccagagtggaaaaatgacccaggggactgatcagattctctctccctggactacagaattgagactaactgagagaaaagagttgttttctgcaggatctgggacatagaaatgcaggaacaagtggaggtggatgggtgggtggaggggacacgtttttcgctaaagagaaagctggtgtacagagatgttagatgtacggagagaataagagccaaaagatggagagcacagactacctgggatctcagtggcttctcatagccagttctagtgccctcctgagtctggcagcacctcctgcccttggaggttctttgtgtttgtttgttttttaaaactgtccatactacacagatacacctttatggttcttacactgaattctcttcattccgcctaagaaagctctgctgacattttcttcctgggaatcagggagttctcattaatccttatattaagcagagagaaaaggcagaaaatggaagtgtgtaaaccggaatccaggagcccatggtgatataaataagtacatagatgagtggatgaacagagaagcgaaagcttttccttacagaagaatgccaactactgaaggaaagatggaattagaaaaccaccattggcaattattatagtactaatttattcagggaagaatcaatgaacactaaaatcagtgggtgaaagttggatgatcaacaggatttctataggaaattatctcctcacaagatgtttattaattacaaaggggaaaatagtaactttgcagtggaagatcctggcaggtaccatcttaacccaatgatcacagttaacacacccagtaatggggcaaattgatagcatgtcttctgatatgatatactaagaagggcacacacggctcttggagaattcctaccaaaaatgcatacccacaatctaatcatgaggaacagcagacaaacccacattctacaaaagaactggctcgaaacttcaaaacatgtcaaggtcatgaaagataaagaaagatgaagaaactgctccagattgatggaatttaataagacatgagaactaaatgcaagatgtaatcctcgaccacaaaaaatatatatttttttctagaaaagatattattgagaaaattggtgaaatgagaataaggtaatcataatatatcaatgtcaatttctcatttttgttaactgaaaaaaggttatgtaagagaatgtccccttgttttaggaaattgtgttagtctgttttcacactgctataaagatacttcctgagactgcgtaatttataaacaaaagaggctgaattgactcacagtttggcatggccggggaggcctcaggaaacttacaatcatggtggaaggtgaaagggaagcaaggcacatcttacgtggtgtcaggtgagagagagagagaaagagagagaggaagtgccacactttcaaaccatcagctctcctgaaaacccactcactgtcacaagaacagcatgggggaaaccacccctgtgatccaatcacctcccacgaggtcatgccctcaacacgtggggattacaattcgagatgagattggagggggatacagaacccaactgcatcagaaatatacactgaggccggttatggtggcccacgcctgtaatctcagcaatttgggaggctgagacaggtggatcaactgaggccaggagctcaagaccagcctggccaatatggtgaaactccatctctactaaaaatacaaaaattaactgggcatggtggcatgcccctaatcccagctactcgggagggtgaggcacaagaattgcttgaatccaggaggcggaggttgcagtgagccgagatcacaccaccgcactccagcctgggtgattgatggagcaagactctgtctcaaagaaaaaaaaaaaaagaaatgtacactgaagtatttaggggttaaagtcacatacacagatgaagacaaccaaaaattaataaatacaaacttccaggctgggcgcggtggctcacacctctaatcccagcactttgggaggccaaggcgggtggatcacctgaggtcaggagtttgagaccagcctggccaacatggcaaaactccgtctctactaaaaatacaaaagtaagccaggcgtggtggtgtgtgcctgtaatctcagctactcgggaagctgagacaggagaatcacttgaacctggaaggcagaagttgcagtgagccaagattgcaacattgcaatccagcctggatgacaacagcgaaactccatctcaaaaaaaaaaaaaaaaaaaaaaaaaaaaatttcccatattccctcccagaccattgttcttttttccaccccaaacatccccagctcccttgaagaagatgccatcacactctccctttcttgctgtggtctcagcctcccggccgcctcttggtcactgatgatgtcagcccctgcccttcagcctttctctccatcattcttccacaaatgatcttagtccacccaactccttccctctcggctccttgaccgctcgtctctttccctgcgttacacttctgccacccactgtcaagccttagaccttgtcattaccagtaactgttgcctccgaagcctcagtttcaagcatcgcacctgataaccaccaccacctcctatctgtccggctcacttccttaaattgcctcccttcagcagctccaatcaacgcagcctgagaacaatggtgatgatgaaaataacagcactgccgcaacacttaccccatgccaggcactgtcctaaatgctttagaacagtgttcaaaattgaacaagtgttcggtcacttgttcaatcctcacaacagccctaggaagtagccttattcttatccccattctatagatagggaaactgaggcacagagaggtcaacgaaggggcccaaatggattcagctagtgtgggttgagctgagatgtgtacccaggctgccaggctgggctccccattttcactctctctcctttcttaaccagctcagattttgtgggctactgttatacttcctcctttgcaaacagccccatctctggtctcccctgggctttgggctcactctgggcagcactccaggctgggcaagttcaactctgcttcttccacacctgcctggagcagctgcacacagccctggtcactgatgcactttccaccaactacaagccctagggaccctggtgccagcctgcagtcccgctgcacccctgcagccctctcactctcttccactcccacagatgaccataccacactttccctctccgcaaaccccatccctccttcccaccctcacatgaggctgatgacggtgcctcttgtttctctgagaaaatacaaggaattagtaaggcattttctcctctccctgcaggagactgaacctgtggcacccgccaccaaatctgccggcctattcacagtccctgccatttctctcgttaagatgaactctccgcctcaggaacgagatggcggttccctggaggctgagtgccgtttgcggtgcccaaggaggccgagctctgttgctgcgaactccagtggtcagacctgctcatatctcagcatttcttcaggaccgacctatcccagaatggtgtggagtgcagcacatacacttgtcaccgagccaccattctggctccaaggctgcatctctccactggactagcgagagggttgtcagtgttttgctcccgggtctgcttccggctgcttatttgaatccttgctctgcgacggactattccctggctgcagccctcactcttcatggtcactggggccttggacaagttgttactgattatgttcatggggatgcctcgcagaaagctgccaaggcagggcttttggcattttcagctttaacctttgctgggctttgctatttcaactatcacgatgtgggcatctgcaaagctgttgccatgctgtggaagctctgacctttttgacttcctactttgaagaattgatgtatgcctctttgcctctgctttgtcatgccattaagctcacaataaggaagaaataacagataagcccattggtggacagccttcttctcttaatcacaagattattttcagaatttaatctttgaggaaaaggtttgagaggaattatatctaagttgtgagactgagttctgtattctggtgagttaatggggttgcctcccagcttcttataagactcacaatataactaaacatgatatatcagcttttgccttttaatttctcaatctcttaaagagaatccagctttattatgattagtacatgatcaaatttccatatttgccttgggaataatggacaaagggaaatactcttaattcatgaataaaaactttgcagaaaattagacagtgtttaattttcaaaaacttccctctctagtcagtagataccacctactgatggttacatatactagggaaattttaaaattaggaaatgctgctatctcatattataaatttctaaatcctaggaagaaacgcttggagtgcttctgaagatacagaagttccatttaagggcaagtttccccagagacatatcaaaatattatccattgtaaactgagatttaattctcaaatgtattctacttgttctaaaacaatctgtccacaaatataaaactataagtaataaattgttatttccgcacaatgggaatctctaatgtgaaaatgtattctatgaaaataatttttttaaataaaatgttgtataaaaaaaaaaaaaagatgaactgtccctgcatcggcctaaaggtatcagtgctcaaaatcccactcctgctttccaactcaaaggcttgactcttgcagttcatctctcttctgtatcatcagatttttcctctctatcggattattgccctcctgcttctcctccatttctctgttcccctttatagcaaagtccttggcagagctgcccctgcatgctgtctccactttctcatctcctgctcttgaatcagtcaagccaggctgttgccttcatcctcctctacaaccatgcatgccaaggtctcctggccaaatccaatggctacttcccagccctcatccgacttgacctctcagcagcattcagcccacctggggccctctctttccttgccttccaggacctcacgctctcctgggcttcctcctgcctctccaagcacaattctgtctcctttgctggctcttacacatgtcccccctctaaaatgcagggtgttctaggactcagtcctcagacttcttcccatctctctttatcctcactcctgagtgatctccttgggtctcatggctttaaacaccatctgtattgtaacaactcccaaatttatatccctagccctaacctttccactaagcttcagacttgtacatctccattcagtgtctccactgggatgtttcatacacatctctaccccccctcccccaaccttaaccctaacgctaccacattcgacactgaactctgggttttccctcccagatctatcccaccccaacattccccatctcagtaaatggcaccagcagccgctgagttgtgccagatgagaaccttgaagtcatcttgaccctctcccaccccacgtgcagtctatcagcaaatcctgtcaattctgctattaaaatacagtcaggatccaaccacttcccatcactctcacagctattgtcctagtctgagtctggatgatggcaatcactgccgctctggtctccacctgcttcctctcttgccccttcagtcttttctgaacccagaagccagagtatcttaaaacataagtcagatcatggctctcctctgcccaacactccctagttctccctgtatttctcagagtaaaatccaaagtcctttgggacactgaggcacagtaaaggggcttcatgcttttttttgtaaacatgcatcatctcatgtgattaattcaattactccctcaaaaccctatgtggtagtactgctaccctcatattacagatgaagaaactaaagctctaagaggttaaattgcccagagtcacacagggatttatggcagagctgggatgcaaaccccagcctttgactccaagtccagtgcactttcttctaagccaggctggaactgtgggttctcgcttgggttctgccactatcttgctatgtgatcttgggcagtcccttcccctctccaggcatcagctttctcacctatgagatgggaaggttggctatgtcctcactcagggtcagggttacagcagaggatctgggagagccatttggattggccttaccttcacagctgccttcaaatttagactttcgacaggctctcccaatgagaggacatatgcagttactgacacgcactgactgaaagaagatgctggctgtacaaacttgctggacccactgctggtgaggctctgagaattaattacttttatataaccataattatatcatgaatagcacaatcctacaggattatactgtagtagttaaaggcattggtttgttgtgtttaaacatttgcacagaccacatttttgtaaactcatttggatatctatctatctatcaatcttttcttttcttttttctttattttaaatttgagatgaagtcttgctcttgtcccccaggctgcagtgcaatggcgcgatctcggttcactgcaacctccacctctcgggttcaagcgattctcttgcctcagcctcctgagtagctgggattacaggcgcctgccaccatgcccagctaaattttgtatttttagtagagatgaggttcccccatgttgaccaggctggtcttgaactcctgacctcaggtgatctgccctccttggcctcccaaagtgctgggattacaggtgtgagccactgtacccagcctgtctgtctgtctgtctgtctgtctatctatctatctgtctatccacctacctatttatttagagatgaggtcttgctatgttgcccagctcggtccctaactcctgggctcaaacaatccttccaactcacacctcagcctcctgagtaactgagactacaggtgcatgccaccacaactggataatttagaaaaaattactttttagagatgaggatcttgctatgatgcccaggctggtctcaaactcctggcctcaagtgatcttccctcctcaacctcccaagtagctgggattacaggttgtctttatttttcaaaaccctggaaaccccaccaaatggagcttttggcccttttctcccaggtccctcctcccagcaccatgactcacgttgaagatattactgatgaccatcctcaggttgcctaaagctgtcacctccaccagcaccatcaccaccaactgcgccaagttgaccttccccaagacagcatccactgagatcagcaccgacaaagcactcatggtggccagccgaatactgggggagagagggagagccaggacgactgagaaggaaggatgcctctcactcattcattcattcattcattcattcattcattctttcaacaaacactgttgggcacctactttctgtgggaatagaagacaagatttctacccacctgggcgctgatgctgcagagtggagtgaccatctcttctcccgttaaggtggcctctgcaccctgagccatgtggtctggcagatgacttaaccactctgtgcctcagtgccttcatctatgaggcattgatctacacacactcatctgactgagggtgatcggggtgactgttccctcaggggatctgataactgggattctgcccagtcttcttttctgctgccatcattcggatgctcaacagagggcactcttcccccgcaggcctgcccacatccagtcaccccatccccatctggggccactgtcccttctctccgtctccgtggcagtggaaagaaactggatttggaatcaggacaagcccggcttccagtcccagccttgccactggagtggctatttcatctcactgagcctatttctccttctgcaaattaagaatgatgatcaaacgtatcccatgttggtgtcctggggatgtgaaggagtattcttcctatcggtgtgtctagcaccaagactggcacaaagaaccaacttctgaaaagacgctagccttattaacgctattatgattccttccttcctttgaccaatgagcatgctcaggagtagaaaattattttggtcttgaagatacttatgatccaaaaaaaaaaaaaatgtacttatgatctagacaggctacaccatgagcctgtcaactaagaatatctgtgatatcacaaggctagtggggttcattggaaggagagggtgatgctgactggacttatcagggaggacttcctggaggaagtggtactgagctggacaatccatggacatccagtctcccctgagcagcttgctctgagactccctcctccctctgggagttaatgatgatgatgctacaaccacagcaacagtgatgataatgatttattataagagcattttgtaaaacaggcttgtaacagcatcacctcttttaaattttaaccctataaggctgggtgcagtggctcatgcctgtactcccagcactttgggaggccaaggcaggtggatcacttgaggccaggggttcaagagtggcctggccaacatggtgaaactctgtctcaactaaaaatacaaaaattacccgggcatggtggtgcatgcttgtaatcccagccactctcgaggctgaggcatggcagtcgcttgaacccgggaggcagaggtttcagtgggccgagactgcaccactgcactccagcctgggcaacagagtaagactgcctcacacacacacaaaaaaaattcactctctgtaaaatcgtgctagctcaccattcagtatcccattttacagagggtcacgtagaggattaaaatggactttttggaaacagtcatgccagctgatcacaaatgtgaggttcaaatccagctggcctagatccaaagcctgtgctctgaagtctggactcagcttccccagtgtttgctgcagactatgcccgcttaagcctcaaggactttaggggaaggtcagaaaagggcaagggcatggggaaggagtcttacagggaccaggaatttagaataaggggttactcaatgttccatcgtgcctggacaggttattccttttaagtgggtgttcatttcattgacaaaggcttaactcaggagcgtgtgtgccggcggcggtatttcattcctcaagggccagtttgtgctgaggaggtgctaagacagtgatgtgcagtggttaggagcgtgctctcaggtctaggctgcctgggctggaatcttgactcagacactttctggctgtgtgatcctgggcaatttatttaatcactctgtgccttggtgcctccatttataaggtggacccaatgcctctggagccacggtaagggcaaagtgagttgatatacgtcaagcacaataaaggagttggttattgctattatcttctagggagagtcctgcagatttcaaaatacattaaaaatatcacacttttaaggccaggaatggtggctcacacctgtaatcttcgcactttgggaggctgaggtgggaggattgcttaaggcctggagtttgagaccagcctgggcaacatagtgagactccatctctacaaaaagcaaaaaaaaaaaaagctaggtgtggtggtgtgtgcctgtggtctcagctactcaggaggctgtaattccagtacttttcagagccgaggtgggcagatcacttgagcccaggagtttgagaccagcctgagcaacacagtgaggtcctgtctctgcagaaaatagaaaaatcagctaggcgtggtggtgtgcacccacagtcccagctacttgggaggctgaggcaggaggatcacctgaacccagtgaggttgaggctgagtgagccatgaacatgccacttcactccagcctggacaacagagtgagaccctgtctcaaaaacagttttaggctggacacagtggctcacgcctgtaatcccagtactttgggaggcctaggcaggtggatcacttgaggtcgggagttccagaccaacctgacccacctggtgaaaccccttgtctactaaaaatacaaaaattagcagggcatggtagcaggcgcctgtaaaaaaatttaactcaggaggctgaggtgggaggatcacttgagcccaggaggcacaggctgcaatgagctatgattgtaccactgcactccagactgggcaacagagcaagaccctgtctctaaaaaaataaataaaattttaaaacatcccacttcagagttccgtttattttcatttttgctccaatagccatttgctaagttatcagtatgtgaggaaaacaaacaacaacgttgaataagataggcccctcccctgaagggactcaaaacagaaccaaatcagtcccaagtcaagtggcacaagctggagtgttgccaagggagagtaccccgtccccaggggcaggcctgggcaccacccatcagcacagccctgacgggaaccggtcaggaaggagccagtttcagcaggggtcacccctagggggatccaagcagtcaggggtggggcaggggagttcactcaggctgcgagtgacttctctcccttctcgtctttctagattgagtcaagaacaaacaggtccctgtggacatcagatgaggggagcagccctagactgtggggcaggaggctgaaggctggtgtgaccttaagctaaggcagcaacaccaaaccagggccaccaccatttgaaatcccccagggtgccctttgtcacttcccaggtggacacagtgtgtgtatgcgtgcatgtgtgcgtgtgtgtattgaattctggtgggaattaactcatagactgtttttgttttgttttgtttttgagacagagcctcactctgtcgcccaggctacagtgcaatggtgcgatctcggctcactatagcctccgcctcccgggttcaagtgattcgcctgcctcagcctcccaagtagctgggattacaggtgcctgccgccacacccagctaatttttgtgtttttagtagagacaggatttcaccatgttgctcaggttggtctcggactcctgacctcaggtaatccacctgctaggcctcctaaagtactaggattacaggcatgaaccaccgcgcctggcctaaaactgtttttgttttttttttttgagacggagtctcgctctgtcacccaggctggagtgcagtggcaccatctcggttcactgcaaactccgcctcccgggttcacgccattctcctgcctcagcctcccgagtggctgggactacaggcgcccaccaccacgcccggctaattttttgtatttttagtagagacagggtttctccgagttagccaggatggtctcgatctcctgacctcatgatccccccgccttggcctcccaaagtgctgggattacaggcatgaaccactgcgcccggcccctaaaactgttttttgagacagggtctcactctgttgtccaggctggagtgaagtggcacgatcatggctcactcagcctcaacctcactgggttcaggtgatcctcctgcctcagcctcccaagtagctgggactgtgggtgcacaccaccacgcctagctgatttttctattttctgcagagacaggatctcactgtgttagtcaggctggtcttaaacttctgggctcaagtgatctgcccacctcggttcccaaaagtactgggattacaggtgtgaaccaccatgcccagcctctaaaccttttaaaaaagaaaaatatataaagttttttccctccagggccaatcgggagctggctagactgtgtttcatgttctgagcactctggagcatgtggaaaaggttataataaaaagttggagccatctccaccacttagctgtgtggccctaggcaagtgccttgccctctctgagcttccacttccttacctgtataccaggttagatccctacccggaagagttaaacaaaataatatttgtggagtgctcagcacagttcctggctcatagagaaatgtttaacagcagtgcccagaggtttagcagggtcttagaaggggaggctggaatggccttgagaggtccctaagatgcctaggatgacgtttaccatcatctgggcagcacagggattcagaggtttgaacaaaacaaaacaatgtttcaggaaaaaatttagcctacttcctcctattaagtgccaatgcccttttaaaacgtgtatagcttgatgtgtaatcatcacccaggtgaacatagagaacattttctgcaccccatgcggttattttgtgttccttcctaatcaatatccacctcctgcccaggtaacaactattctgacttctggcaccatacattagttgtgatggttcttagcatttcacacaaatgcatgtaaacaaagcacaggtaatttaatgaaaataaaggcatggctatttattgtctagcagcattagggggctgaaagtcctttcttttcaagagaatgtctctcaggctggacgcggtggctcatgtctgtaatcccagcactttgggaggccgaggcgggcggatcacctgaggtcaggagtttgagactagcctgaccaacacggagaaaccctatctctactaaaaatacaaaatcagccaggcgcggtggcacatgcctgtaatcccagctactcaggcggctgaggcaggagaatcgcttgaacccagaaggctgaggttgtggtgtgccgagatagcgccattgcactccagcctgggcaacaaaagtgaaactccgtctcaaaaaaaaaaaaaaaaatagaatgtctctctaggtgtggcatgtctatttctctctgtctaacgtgtttccttcttacgttttccataaacttatattgattatgtaactttacaaaatcataatcgacaataacaggaaagaaaggatgcaggaggaatgtaggcctggattccttgtgatacacggagtagggctgtccagtaaaatacaggatgcccagttaatttgaattttaaacaatgaataatcttttagtataaggatgtcctaaatattgcacagcactggtgctagacagagagggggcaatatcccagatcttctggaacctgtcctttcggggtccattccctctatgacccagaagtgatccagccaccatcccaatacctgaacagtgtgatgaccaccttcccagaagggaactggctcaggaagccgtccagcaggattgcccactgcacaccaagcgccagcatgaagaggttgaaggccacactgctccagctgtgtctccggaaactcgaggtgaggaagcccaagccaatggccgccatcacggtcagatcttggccaactgctcggtggggagatggcgagaaggacgagggggaagcagacgagatttagggtggtatgaaattagagtcttactaaatggcagctggaaggggcatgcaagatcgtttacaagtatttggtcaagttactttgcctctttgagcctcaatgttctcaactgaataatggggataacataacatgccgtgtggggataagataaggattagaggagctaaagctaattaagcacttagggcagggcctggcccataatgagtgctcagtaaatgtggcaattattctattattaaacctaataataagaacaagtgtaaagcacacgtgcttgacgcacatggacactcagtaaaggtcattgctgctgttattgcatatgagggccaaccccctggctgggcacatgagaaaatgaagccacagaagccaagtgacttgtcccaggacacacagaaaagagagggcagagataggcccagcgctcttgttgttgggaaccacataatcttcacagcaaacctccctccctttgccgcctgctgcgagggacctggtgagctggctggcagaaaacatcagggccacctgggtagccctcacctttcccggtctcagaccctgagcagaggctgctgtggcaggtgagtggaagagacgcacctgagggcagggaggggcccagcaaagcggagggtgagcactttggtttaattccagttttgaaaaagggttagcagcttgagctccagaacgagacaaacttgggttcaaatcaggactctggcaccctctaactgtgtgatcttgatctagttacttaacatctctgagctttataacagcctacatttcctaagcgtttaccatgtgcctacgctgttttaatcactttacatagactatcttgtttcgttctcacaaccacactttgacgtgggtgctgttactgtcaccattttacagatatgaaaaccaaggcacagaggcgttacgtaacttgccccggtgggtagagctaagatttttttttttaatatcgagatagagtttcactcgtcacccaggctggagtacagtggcaagatcttggctcactgcaacctctgcctcctgggttcaagtgattctcctgcctcagcctcccaagtagctgggattacaggtgcctgccaccgtgcccggctaatttttgtatttttaatagagaaggggtttcgctatgttggccaagctggtctcgaactcctgacctcaagtgatctgcccacctcggtttcccaaagtgatgggattacagacatgagccacagggcctggcctacagccaagatttacacctagataatctgctggagcctgtgccttagactaccacaccatctgccctccctcttcttgttcttgtctgttaaataggggaaatgatcatactccttcattaggttgccagaatcaaatggtatatgtaatgcacataattgctccaaactctaaaagctattttatcaataatcaccaactgttttcgcacatgaataaatgactggagagagagagatcttgaagaattttttttccgtcattaatattgtctctaagtttgggaggtgttttacttttttagttttagtgtttaaattttctgcaaccagcatgtagacaatttttttttttcgagacagagtctctctgttgcccaggttggagtgcagtggtgcgatctcggctcgctgcaacctccacctcccgggttcaagtgattcttgtgcttcagcctcctgtgcttcagtgggaaccacaggcgcgcgccaccacgcctggctaatttttggccaagctggtctcgaactcctgacctcatgtaatccacccacctccgtctcccaaagtgctgggattacaggcatgagccatcgtgcccagcctagacaatgtttttcaaaaaggtggaaggggaagcataggttttgagttcacatggctctgttcgatcccagctctatcatttcctattagattaaacctcactaaattgccaccagttgactcttttggacatataaagataccaatttaggaggatgaggtgggcagatcatgaagtcagcagttcgagactagcctggccaacatggtgaaaccccgtctctactaaaattacaaaaaaattagctggatgtggtggtgggcacctgtaatcccagctactcgggaggcaggcaggagaatcgcttgaacccgggaggcagaggttgcagtgagctgagaccgcaccactgcactccagcctgggcgacacagtgagactctgtctcaaaataaataaataaataaaatgaaatatcaatttatgtgtttccacttcatagccctgtggtcttgtaagttgcttactttccttatcagctgaataagggtaattagacccacctgagaggtttctgggaaatccaaaggaaataatgtttagtacagtgactggcacatggagaacgctcaataaatagtgactgttcatcaacatcatcatgacaatcacagcaataggaactcacctgccactggtctccagccctggccttgataacaatgagaagctctcattactggaactctccaaagtctcagaaaaagtctttgatttataaagtacatttaaattcacttccattgaaacatacacatacccagggtctgccagagaggacaagggaggacactgacatttccaaatcaacctgacaccaccaggatataggaggcccccaaggacctccatgggacctggggatttggggcgtgggtgagaagtgggcattaggaaggattcaactctttgcacttcttctgacaacaaggagggaggtgcagggaatgtttctatctcctgcttgcatccttaggaatgggggtgtgtggccaggggacattttctacaggggttcctcttgggattactcaaattccctcaggagccaagcaggaaatatgtatatgaaggtgcagtgcacatgcgggagcagtgaggcttgtgttcagttggagactgcatgccccacttcagatatgcaaatccaaccttttattaaacacgattgttaaagtgcatctgccattttgtagcaatgctatatgcatagggcccagacttattgaagattccatgagtagagcaattcttccattttcctctcattttacagaaggggaccagagagagcctgtgaggggcgctcatgaccgggcccagaggagaattgtacattgtaaggaagaccttcaggaaaagtttatgaaagctccacaacttggagaaagaaaatctaacctggtagttcagcagtgaactaactaccaggccccaaacatgccggcagcagagcccagctctgaatgcctggaactatgtccttgcacaggctaggctgtctctagctctttcttctctcacctcactaagtgatcttaggcaagtccattaccctctttaggcctcagtttccctgtctgtaacacataggagttggacttgatactctctaaggcttttacagctctggaatattccaaagaagttagtggaagatggggagaggagagttgcctggataagggcagagttggggccctaaagattaggaagtcagaccaggtatggtggctcacacctgtaatcccagcacaatcccagcactttgggaggccaaggagggaggattgcttgagctgaggagttcaagaccagcctaggcaacatagcaagaccttgtctctacaaaaaatacaaaattacttgggcgtggtggcgagtgcctgtagtcccagctactcaggagggtgaggtaggaggatggcttgtgcctagaaggttaaggctgcagtgagctgcggtcacaccactacactccagcagcctgggtgacagagggagaccctgtttacaaaaaaaaaaaaaaaaaaaaggccaggcacagtggcttatgtctgtaatcctagcactttgggaggctgaggtgggcagatcacttgaagtcaggagtttgagaccagcctggccaacatggtgaaaccccgtctctactaaaaatacaaaaattagcctggcatggtggcgcatgcctgtaatcccagctactcaggaggctgaggcaggagaatcgcttgaacccagaaggctgaggttgcagtgagccgagatcgcaccactgtactccagcctggatgacagagtgagactgcagctcaaaaaaaaaaaaaaagagatgaggaagtcagaggatcctgggtgggggctttattgggcacagctgctgcccctgatcccgattccctgattccaggtatacgcgctcagggccttcctccccaaggctctacactgtccctgagagaggaattgtgcctcagccaacaagatgaaattagggcagcagtttccatgagctgttgacagagctcatgcaccccaaactggtcaggaaataacatttgatttcaggcttctcctccccctgccccctcatcctcccacttctcctgggctccaggcccatttccacccatccattatctgggctcccgcttcagggctgggtcccagcttggagcatcctcactggtatcagcctccacctctcacagtctgctctgcactcacatcagctgctggtttgataagctgatgggctctaaggtgttcaggggtgataagaagtggatgtgctacccgggcgcccatgcctggacccagaggggaattgtacattctacggaaagccttcaggaaaagtttatgaaagcctcatgacttgcagaaagaagtctaacctggtagttcagcagcgagagataaggcaatactcaccattgttgtaacagcaggcacacagatagacagtaccccacgttccaggcactgttctacgtgccttacagacttagcccacaacagcctcaggtaggaggtacgatttattatccccattttagagatggggaaagggaggcacagagaggtgctataactagtccaagtcacagagctagtaaatggtagcaggaggattcaaaccctacctacctaggtttaaccattatgccatcctgcctttctatacagcatatatagcgtaacggtgatgaacagtgtgggtctctcaatcaggttgtcagtgttcagagcctggctcttcctctgtgtcccagcttcctgagctgtaaaattgagatgaaacaatgccagctgctcagaggattgccatgagcattgagctcgctggctcatgcaagtcacttcgcccagcattgggtacgtagtgagtgttagtaactgttaccccgtgccggccgctgattagcggtgtgactttaggcaagactgctctcccccaggcctgttgcaaagagaccacttgcaaagagttcgtttggataacagcactttggccttctgagtccatccccttgggcagctgcctcctccggtcagctgcctccgtgattctggatctgcgccccctcccactcttgcccctccttctggcctgcagaaacttcagcaccaacagctctgaagtcacacccagcttcactctcccaggctctagggttgacctccaccctgtgctcccactgctgcctggaaagaccactgcagcctcaggaggccgccacctcctcgcccacagcctctactctaccggcgactctcacccctccagcagcctgggaagaaaaacagagatttcccaaaggggcagaccaaagctgcagtgtggaaggtgccagggtttggagtgtttacatgtcactgggaaaactcctctgtcttctagtagcccctctctctgcctttgaggaatatggggtggggatgggggactgagtggtatccacagcacaggacccaggatagtctcctagtttggaagccttagggaagctctgcctggtaggcgattgttacagtaatggcccccagtgaatcaccaactgccaaacacgtgaatgaggtcatctgaggccatcccaccccaaactgcagatgcatgaatgaccctgggtgaaactaacagaagaactgcccagctgaacccagcccagttgttgcaccacagaatcatgatcatgagtaaattaaaaggttactattttaagccactaagtttggggtggctgttatgcagcaataggtaattgatactctctgcttcccctaagcatatcataggccccttaactccaagcccagaatgaacatatcattgttcattcatcctcacaacctgtccctccccttctgtctctcatctcaggaactggcacctctctatgccaaatcatacatctgcagccagccttaactccccactcttttcatcaagtacagctgacttatctcctaaatatctctagaatctcctccactgcccctgcccatctggtctcatcacaggtcatccagaccagtagtcattacagcaaagaacacacaccccagaaaatgctcaatacaatcaccagggtagctggaagaaaacaagcaattctagttttatttattttatttaaaaaattaagaaattaaagcttttgggccaggcgcggtggctcacgcctgtaatcccagcactttgggaggccaaggcgggtgcatcacctgaggttgggagttcgagaccagcctcaccaacatggagaaaccccatctctactaaaaatacaaaattagccgggcgtggtggcgcatgcctgtaatcccagctactcgggaggctgaggcaggagaattacttgaacctgggaggtggaggttgcggtgagccaagatcgcaccactgcactcccctgggcaataagagcaaaactctgtctcaaaaaaaaagcttttgataataaaagctaatactctttatgtgtgtcaattcatttatcctttcaacaacttaatgaaacaagtactatcatcctctgacagaagtagaaacagaggcagaaagaggttgactaatctgcccaaggtctctaagatacagaggcaagatttgaatcagtctagctccaggaattctcgaactttcatgcacagaagaatcaccaagagggcttgtgaaaacacagactgctgggccccaggcccagagcttctgatcagtaggtctggcctagggcctgagaatctgcatttctactaaatttccaggagatgctgaggcagcaggtctggggaccacactttgagaaacatggatctaggctattctatctctaaaggtactttgtgaagttttcaattctgcaaatatttaatattcagattcacccagaagccacccctcacttgctcaggatgtcatacagccttgagtctcctagctttggaaggtgccctaagggaatattggtccaatgagaaggatttgatatgcatttctctatattcttcatattgcaactaatggcagggttttatgtttcatttatttttattttcatttttttttagacggagtctcgctctgttgcccaggctggagtgcagtggcgtaatctcagctcactgaaagctccgcctcctgggttcacgccattctcctgcctcagcctcccaagtagctgggactacaggcacccgccaccacacccggctaatttttttgtatttttggtagagatggggtttcatcgtgttagccaggatggtctccatctccagacctcgtgatctgcctgctttggcctcccaaagtgctgggattacaggcgtgagccactacacccagcctttatgttttatttatatttttaaatttgttattacagcctcgcttcacctcaaatatttttattttttttgagacagggtcttgctctgtcgcccatgctggagtgaagtggtacaatcccgtcccactgcagcctcaagctcccaggctcaagcaagcctctcacctcagcctactgagtagctgggactataggcatgtgccaccacactgggttaaattttaaagtttttttttttttttttttttttagagatgggggggggtctccctatgtttcctaggctcgtcttgaactccttggtttaagcgatcctccccacttggcctccctaaatgctcagccagggtgtttttttttttttttaattaactattacagaacttttaaagcatatacgaaaacagagagaacagcacgatgaccctacgtgcccatctccaaactctgatgattgtcacatgagaccaatcttgtttctataatccttctgtactttttcttttttctggcataaaagcaaaccccagatatcatgccatttcaatgtgcctctctaacagatggagacttaaaaaacaaaaacaaaaacaacccaccatgcttttatcatacctaacaaaattaacaataatccttgtatatcgtaagatattcatgctatattcagatttcctgattgtctcaaaatgtctttttagaattggcaggtttgaataatctattatagtttaccaggactgaattcaattaagtggattgacagattaagttacctaagtttaactcaacaaactttcacaaaatgaagtaatggcttaaccaactcgtgcagaaaaacacagattggaagcatagaaataatggcagtcaagtgaacaaaagggaaaaggcagagtgaaacttctcctcgtacaagctgtcagtcacattcgagatttaaaacatgttgatctaatcagatctgacaagtcaatcaagacaatttcaaattatcaagaagactctgaggagtgaattttcatccactatcgtcaactgtagcaatggaccctgcctggagattgacaccattatgattagtaatttgaaaatattatatatttcattttgatctctttcaattttcctaatttgtatgtatttattgtaacatacaaaatatattaatgtagtaatacttaaagtaatacttaaagtgtaatatataaccatggtacatgctcaaaaaatcgtgtgtacaccatcagaatgttgaagtcctcaggtcaatactacactacagcctccacgctggtctggtgtctcaagccatgcccctttccctgtgcccaacaccagccctggcatggcttcctccatgacccaaacccaaacttgtctcgctgctgtttactattcggacctcagactgaagccaaacttcgtatgcagcccagtgagtctgccacccgctgcttccctctttatttttatttattactattatttttttcagacagagtcccactctgtcacccagggtggagtgcagtggcatgttctcagctcagcaacctctgcctcctgggttcaagcaattctcctccctcagcttcccaagcagctgggactacaggcacgtgccaccacatccggctaatttttgtatttttagtagagacagggttttaccatgttggccaggctggtctcgaactcctgacctcaggtgatctgcctgccttggtctcccaaagtgtttgggattacaggcatgagtcaccacacccagtccctgctctcctctttgtttttttgttgttcttgttgttgtttttgttgtttggttttttgagatgaagtctcactctggcgcccaggctggagtgtaatggcctcccaagtagctcggattatagacgtgtgccaccacacccagccagtttttataattttagtagagatgcggttttgccatgttggccaggctggtctcgaactcctaacctcaggtgattctccagccttggcctcccaatgtgccgggattacaggcgtgagccacgtcgcccggccctttgtttccccttttaggctccagggcaatgcaatgttaagcccaggctcagtctgctctattgtgtgtgcacgccatggcacccactgtgccctcacttggatgaccctcctttgtcccacaggtaattcctactgagccttcaagacctggctgggcagtcacctccctcccctgacaccatcgtctcccctgcctgggttgtggaccctcctctgagcttccgtataaagtgagtttctgaggacattttgtacctacgttagtagcacggtgcaggggtaaagaacatggaccctagagtcaatctacagggttggaatagtggctgctaacctactgggttatatgacaaagactcaagcccactgtaaaatggggccatgatgcataatggttaagtgtaaggaaactaaatccagggtggctaaatttaaatacgctgtgctattgctagctgagcgaccgtgggcaaattactcaacatccatatgcctagtttcctcatatgaaaaacgaagatcataatagtacccacctcattgggttattgtgagggttcaatgtaaagcatgtagaatagtgcctggtacatagtaagtgctcataaatatcagctctaatcatcatgagtctggatcccacattggatgtcatacatggttgaatgaatggaatgcattgaattgtattggattgaaatgaattagagtaaattgaagtgaattaaaattgtgccagctcttgtttgtctgtcactgaaggctcctctctgggccagcaccttaaatggtataagggcttccctccctaagtcctacttgtcactgccatggcccccaggatgacttctctttgcttccagttaactagccgttcatatcaacctaggaacaagcaaggactcaaccaggctcaagcttcaactttgtctcagggacattcttcaaggaggccctgtctattatcaacaacctatcagcccactgagatgcctgaaactcatttcaatatttttaaaaaagcaaagtcacaccattgtggacatctgtcttatttacagttgtctcatcacagtctgggaatatttttagctgaatataaaataaccatcatcctaccctccccttcagccataccttctggttctggatttatagacagcatgcagacttcccagcccctaagtgagaagaaagctggggtcggtgggggtgggggtggggggtagcaacaggctgaagcttccaaaagaaaactagtatagatatgagcaagagagctgggcacagtgcttcacgcctgtaattccagcactttgggagactgaggctggaggatcgcttgtgtccaggagtttgagaccagtctgggaaacacagggagacccacatctctaccaaaaaaaaaaaaaaaaaaaattagccaggcatggtggtgccctcctgtggtcccagcttcttgggaggctgaggtgggaagattgcttgagactaggaggtcaaggctgcagtgaaccatgatcatgccactgcacttcagcctgggcaacagagtgagaccctgcctcaaaaagaaataagaaatgagcgagaggccacaaaaaggaaacaaaaaccaaaaacccaacaacatgaaattgcttgcataagatagctgcacttgtatcccctaaatctataaaaataaaaaaattccttgccactgaggagagagaaggggaagcagagaagcagagaattatgaagaccatttggtagagggaatttgaggaacaccaaagaggatgcctctcactgtgctgaaaaatcaaggcaggcttcacagaagagggcatgcccaggctgcttctaaaggaaagcttacattgttggctgaatttcggtgcaatctacggaagaagatgggggaatctttttccttgggattttgtagaaaggaacatctgtgcccctggagaaccacaggcctcccccgcccctgcccctgctatttgctcctgtgaccacttttccaatgaactctcaccttgataggatgccacgagccccttttgatcctctaaggaagcgtcatagtgggtaaaaaaatagaagaggagaatgagagctgcttccagtgttagggcccagaggggcaggcagcgccggacagaccgcgggtacttagagctcatcctgtgtccgtctctgtgcaggggttccaccagcaccaggcatcacccctctctccaacacctacttgagggcttgagggagcgataggggagacacccgccaaaggccttatctcaggctgcaaggctggttgtgctggcctctctatggagtt

SEQ ID NO: 85 - DNA, 20 bp, Homo sapiens
tggttgtgctggcctctcta

SEQ ID NO: 86 - DNA, 20 bp, Homo sapiens
tccagtgttagggcccagag

SEQ ID NO: 87 - protein, 49 aa, Homo sapiens
MSSKYPRSVRRCLPLWALTLEAALILLFYFFTHYDASLEDQKGLVASYQ

SEQ ID NO: 88 - protein, 63 aa, Homo sapiens
VGQDLTVMAAIGLGFLTSSFRRHSWSSVAFNLFMLALGVQWAILLDGFLSQFPSGKVVITLFS

SEQ ID NO: 89 - DNA, 20 bp, Homo sapiens
gctgtgtctccggaaactcg

SEQ ID NO: 90 - protein, 50 aa, Homo sapiens
IRLATMSALSVLISVDAVLGKVNLAQLVVMVLVEVTALGNLRMVISNIFN

SEQ ID NO: 91 - protein, 49 aa, Homo sapiens
TDYHMNMMHIYVFAAYFGLSVAWCLPKPLPEGTEDKDQTATIPSLSAML

SEQ ID NO: 92 - protein, 56 aa, Homo sapiens
GALFLWMFWPSFNSALLRSPIERKNAVFNTYYAVAVSVVTAISGSSLAHPQGKISK

SEQ ID NO: 93 - protein, 46 aa, Homo sapiens
TYVHSAVLAGGVAVGTSCHLIPSPWLAMVLGLVAGLISVGGAKYLP

SEQ ID NO: 94 - protein, 45 aa, Homo sapiens
GCCNRVLGIPHSSIMGYNFSLLGLLGEIIYIVLLVLDTVGAGNGM

SEQ ID NO: 95 - protein, 56 aa, Homo sapiens
SLGWNLAVKMAEAGDEELMRLDVSQRNHGGAAVPTGSWMPSTETTIAPNYRDHISV

SEQ ID NO: 96 - DNA, 20 bp, Homo sapiens
ggaggcgctgcggttcctac

SEQ ID NO: 97 - protein, 17 aa, Homo sapiens
GLASRSSSALGNSAWPS

SEQ ID NO: 98 - DNA, 20 bp, Homo sapiens
aaataggatagcaagtgcaa

SEQ ID NO: 99 - DNA, 20 bp, Homo sapiens
ggatcataggtcgaagtgcg

SEQ ID NO: 100 - DNA, 20 bp, Homo sapiens
aggtgcgcgcctacaagcgc

SEQ ID NO: 101 - DNA, 20 bp, Homo sapiens
gatcatctccatgcggcgca

SEQ ID NO: 102 - DNA, 20 bp, Homo sapiens
gttccgcgaccacgtgggcg

SEQ ID NO: 103 - DNA, 20 bp, Homo sapiens
catggagttccgcgaccacg

SEQ ID NO: 104 - DNA, 20 bp, Homo sapiens
ggacgtgtccatgcgccgca

SEQ ID NO: 105 - DNA, 20 bp, Homo sapiens
atggagttccgcgaccacgt

SEQ ID NO: 106 - DNA, 20 bp, Homo sapiens
ccacacggcctcgatgccgt

SEQ ID NO: 107 - DNA, 20 bp, Homo sapiens
gctggtcccacaagtactcg

SEQ ID NO: 108 - DNA, 20 bp, Homo sapiens
ctggtcccacaagtactcgg

SEQ ID NO: 109 - DNA, 20 bp, Homo sapiens
aggccttcacctacgagcgc

SEQ ID NO: 110 - DNA, 20 bp, Homo sapiens
acgggttccggaccgcctgg

SEQ ID NO: 111 - DNA, 20 bp, Homo sapiens
tagaaatcgccctcgtcctt

SEQ ID NO: 112 - DNA, 20 bp, Homo sapiens
accggtccccagcgtcacgc

SEQ ID NO: 113 - DNA, 20 bp, Homo sapiens
ttacctggtgtgcgtggacg

SEQ ID NO: 114 - DNA, 20 bp, Homo sapiens
tctccacgcccacgtggtcg

SEQ ID NO: 115 - DNA, 20 bp, Homo sapiens
gcgcgcctacaagcgctggc

SEQ ID NO: 116 - DNA, 20 bp, Homo sapiens
ccggtccccagcgtcacgcg

SEQ ID NO: 117 - DNA, 20 bp, Homo sapiens
gggccggcgctcgtaggtga

SEQ ID NO: 118 - DNA, 20 bp, Homo sapiens
cgaccaggccaacggcatcg

SEQ ID NO: 119 - DNA, 20 bp, Homo sapiens
catggctccgcgtctggtct

SEQ ID NO: 120 - DNA, 20 bp, Homo sapiens
ctcggccatggctccgcgtc

SEQ ID NO: 121 - DNA, 20 bp, Homo sapiens
cgagaccagacgcggagcca

SEQ ID NO: 122 - DNA, 20 bp, Homo sapiens
cagacgcggagccatggccg

SEQ ID NO: 123 - DNA, 20 bp, Homo sapiens
cgtccgcaacacctcggcca

SEQ ID NO: 124 - DNA, 20 bp, Homo sapiens
ggccagcgtccgcaacacct

SEQ ID NO: 125 - DNA, 20 bp, Homo sapiens
gagccatggccgaggtgttg

SEQ ID NO: 126 - DNA, 20 bp, Homo sapiens
ggccgaggtgttgcggacgc

SEQ ID NO: 127 - DNA, 20 bp, Homo sapiens
ggtcgaagtgcgtggcattt

SEQ ID NO: 128 - DNA, 20 bp, Homo sapiens
ggatcataggtcgaagtgcg

SEQ ID NO: 129 - DNA, 20 bp, Homo sapiens
attattaggaaaaggatcat

SEQ ID NO: 130 - DNA, 20 bp, Homo sapiens
agacaagcattattaggaaa

SEQ ID NO: 131 - DNA, 20 bp, Homo sapiens
agaccaagacaagcattatt

SEQ ID NO: 132 - DNA, 20 bp, Homo sapiens
tttcctaataatgcttgtct

SEQ ID NO: 133 - DNA, 20 bp, Homo sapiens
atgcttgtcttggtcttgtt

SEQ ID NO: 134 - DNA, 20 bp, Homo sapiens
gcattagacttctggggctt

SEQ ID NO: 135 - DNA, 20 bp, Homo sapiens
ttcctggcattagacttctg

SEQ ID NO: 136 - DNA, 20 bp, Homo sapiens
cttcctggcattagacttct

SEQ ID NO: 137 - DNA, 20 bp, Homo sapiens
gcttcctggcattagacttc

SEQ ID NO: 138 - DNA, 20 bp, Homo sapiens
agccccagaagtctaatgcc

SEQ ID NO: 139 - DNA, 20 bp, Homo sapiens
aacccccgttccaggcttcc

SEQ ID NO: 140 - DNA, 20 bp, Homo sapiens
aagtctaatgccaggaagcc

SEQ ID NO: 141 - DNA, 20 bp, Homo sapiens
taatgccaggaagcctggaa

SEQ ID NO: 142 - DNA, 20 bp, Homo sapiens
aatgccaggaagcctggaac

SEQ ID NO: 143 - DNA, 20 bp, Homo sapiens
atgccaggaagcctggaacg

SEQ ID NO: 144 - DNA, 20 bp, Homo sapiens
tgccaggaagcctggaacgg

SEQ ID NO: 145 - DNA, 20 bp, Homo sapiens
gagacgcgctgcagatggtc

SEQ ID NO: 146 - DNA, 20 bp, Homo sapiens
gcaacgagacgcgctgcaga

SEQ ID NO: 147 - DNA, 20 bp, Homo sapiens
gtgtcagcacctttggctgg

SEQ ID NO: 148 - DNA, 20 bp, Homo sapiens
ggtgtcagcacctttggctg

SEQ ID NO: 149 - DNA, 20 bp, Homo sapiens
gatggtctacccccagccaa

SEQ ID NO: 150 - DNA, 20 bp, Homo sapiens
cggtgtcagcacctttggct

SEQ ID NO: 151 - DNA, 20 bp, Homo sapiens
acggtgtcagcacctttggc

SEQ ID NO: 152 - DNA, 20 bp, Homo sapiens
gacaatgggagccagccaag

SEQ ID NO: 153 - DNA, 20 bp, Homo sapiens
agacaatgggagccagccaa

SEQ ID NO: 154 - DNA, 20 bp, Homo sapiens
cagacaatgggagccagcca

SEQ ID NO: 155 - DNA, 20 bp, Homo sapiens
cttggctggctcccattgtc

SEQ ID NO: 156 - DNA, 20 bp, Homo sapiens
aatgtgccctcccagacaat

SEQ ID NO: 157 - DNA, 20 bp, Homo sapiens
ttggctggctcccattgtct

SEQ ID NO: 158 - DNA, 20 bp, Homo sapiens
gaatgtgccctcccagacaa

SEQ ID NO: 159 - DNA, 20 bp, Homo sapiens
gctggctcccattgtctggg

SEQ ID NO: 160 - DNA, 20 bp, Homo sapiens
ctggctcccattgtctggga

SEQ ID NO: 161 - DNA, 20 bp, Homo sapiens
ggagcctgaactgctcgttg

SEQ ID NO: 162 - DNA, 20 bp, Homo sapiens
acatcctcaacgagcagttc

SEQ ID NO: 163 - DNA, 20 bp, Homo sapiens
ttaacccaatggtggtgttc

SEQ ID NO: 164 - DNA, 20 bp, Homo sapiens
aggctccagaacaccaccat

SEQ ID NO: 165 - DNA, 20 bp, Homo sapiens
ggctccagaacaccaccatt

SEQ ID NO: 166 - DNA, 20 bp, Homo sapiens
aaacacagttaacccaatgg

SEQ ID NO: 167 - DNA, 20 bp, Homo sapiens
ggcaaacacagttaacccaa

SEQ ID NO: 168 - DNA, 20 bp, Homo sapiens
ccgtctccaggaacagcttc

SEQ ID NO: 169 - DNA, 20 bp, Homo sapiens
ggctttcctgaagctgttcc

SEQ ID NO: 170 - DNA, 20 bp, Homo sapiens
cctgaagctgttcctggaga

SEQ ID NO: 171 - DNA, 20 bp, Homo sapiens
agtgcttctccgccgtctcc

SEQ ID NO: 172 - DNA, 20 bp, Homo sapiens
gaagctgttcctggagacgg

SEQ ID NO: 173 - DNA, 20 bp, Homo sapiens
gacggcggagaagcacttca

SEQ ID NO: 174 - DNA, 20 bp, Homo sapiens
ggcggagaagcacttcatgg

SEQ ID NO: 175 - DNA, 20 bp, Homo sapiens
gcggagaagcacttcatggt

SEQ ID NO: 176 - DNA, 20 bp, Homo sapiens
agacatagtagtggacacgg

SEQ ID NO: 177 - DNA, 20 bp, Homo sapiens
tgaagacatagtagtggaca

SEQ ID NO: 178 - DNA, 20 bp, Homo sapiens
ggtcggtgaagacatagtag

SEQ ID NO: 179 - DNA, 20 bp, Homo sapiens
ctatgtcttcaccgaccagc

SEQ ID NO: 180 - DNA, 20 bp, Homo sapiens
gggcaccgcggccggctggt

SEQ ID NO: 181 - DNA, 20 bp, Homo sapiens
cgcggggcaccgcggccggc

SEQ ID NO: 182 - DNA, 20 bp, Homo sapiens
cttcaccgaccagccggccg

SEQ ID NO: 183 - DNA, 20 bp, Homo sapiens
gtcacgcggggcaccgcggc

SEQ ID NO: 184 - DNA, 20 bp, Homo sapiens
cagcgtcacgcggggcaccg

SEQ ID NO: 185 - DNA, 20 bp, Homo sapiens
ccggtccccagcgtcacgcg

SEQ ID NO: 186 - DNA, 20 bp, Homo sapiens
accggtccccagcgtcacgc

SEQ ID NO: 187 - DNA, 20 bp, Homo sapiens
gaccggtccccagcgtcacg

SEQ ID NO: 188 - DNA, 20 bp, Homo sapiens
cgcggtgccccgcgtgacgc

SEQ ID NO: 189 - DNA, 20 bp, Homo sapiens
gcggtgccccgcgtgacgct

SEQ ID NO: 190 - DNA, 20 bp, Homo sapiens
cggtgccccgcgtgacgctg

SEQ ID NO: 191 - DNA, 20 bp, Homo sapiens
ccccgcgtgacgctggggac

SEQ ID NO: 192 - DNA, 20 bp, Homo sapiens
gcgtgacgctggggaccggt

SEQ ID NO: 193 - DNA, 20 bp, Homo sapiens
cagcactgacagctgccgac

SEQ ID NO: 194 - DNA, 20 bp, Homo sapiens
cggtcggcagctgtcagtgc

SEQ ID NO: 195 - DNA, 20 bp, Homo sapiens
tcggcagctgtcagtgctgg

SEQ ID NO: 196 - DNA, 20 bp, Homo sapiens
cacgtcctgccagcgcttgt

SEQ ID NO: 197 - DNA, 20 bp, Homo sapiens
aggtgcgcgcctacaagcgc

SEQ ID NO: 198 - DNA, 20 bp, Homo sapiens
gcgcgcctacaagcgctggc

SEQ ID NO: 199 - DNA, 20 bp, Homo sapiens
gatcatctccatgcggcgca

SEQ ID NO: 200 - DNA, 20 bp, Homo sapiens
ggacgtgtccatgcgccgca

SEQ ID NO: 201 - DNA, 20 bp, Homo sapiens
agtcactgatcatctccatg

SEQ ID NO: 202 - DNA, 20 bp, Homo sapiens
tgatcagtgacttctgcgag

SEQ ID NO: 203 - DNA, 20 bp, Homo sapiens
cgagcggcgcttcctcagcg

SEQ ID NO: 204 - DNA, 20 bp, Homo sapiens
ccaggtaatccacctcgctg

SEQ ID NO: 205 - DNA, 20 bp, Homo sapiens
gcggcgcttcctcagcgagg

SEQ ID NO: 206 - DNA, 20 bp, Homo sapiens
cctcagcgaggtggattacc

SEQ ID NO: 207 - DNA, 20 bp, Homo sapiens
tgtccacgtccacgcacacc

SEQ ID NO: 208 - DNA, 20 bp, Homo sapiens
ggtggattacctggtgtgcg

SEQ ID NO: 209 - DNA, 20 bp, Homo sapiens
ttacctggtgtgcgtggacg

SEQ ID NO: 210 - DNA, 20 bp, Homo sapiens
ggtgtgcgtggacgtggaca

SEQ ID NO: 211 - DNA, 20 bp, Homo sapiens
tctccacgcccacgtggtcg

SEQ ID NO: 212 - DNA, 20 bp, Homo sapiens
catggagttccgcgaccacg

SEQ ID NO: 213 - DNA, 20 bp, Homo sapiens
atggagttccgcgaccacgt

SEQ ID NO: 214 - DNA, 20 bp, Homo sapiens
tcaggatctccacgcccacg

SEQ ID NO: 215 - DNA, 20 bp, Homo sapiens
gttccgcgaccacgtgggcg

SEQ ID NO: 216 - DNA, 20 bp, Homo sapiens
gggtgccgaacagcggagtc

SEQ ID NO: 217 - DNA, 20 bp, Homo sapiens
gagatcctgactccgctgtt

SEQ ID NO: 218 - DNA, 20 bp, Homo sapiens
gggtgcagggtgccgaacag

SEQ ID NO: 219 - DNA, 20 bp, Homo sapiens
tccgtagaagccggggtgca

SEQ ID NO: 220 - DNA, 20 bp, Homo sapiens
ctgttcggcaccctgcaccc

SEQ ID NO: 221 - DNA, 20 bp, Homo sapiens
ttccgtagaagccggggtgc

SEQ ID NO: 222 - DNA, 20 bp, Homo sapiens
ggctgcttccgtagaagccg

SEQ ID NO: 223 - DNA, 20 bp, Homo sapiens
cggctgcttccgtagaagcc

SEQ ID NO: 224 - DNA, 20 bp, Homo sapiens
ccggctgcttccgtagaagc

SEQ ID NO: 225 - DNA, 20 bp, Homo sapiens
accctgcaccccggcttcta

SEQ ID NO: 226 - DNA, 20 bp, Homo sapiens
ccggcttctacggaagcagc

SEQ ID NO: 227 - DNA, 20 bp, Homo sapiens
cggcttctacggaagcagcc

SEQ ID NO: 228 - DNA, 20 bp, Homo sapiens
cttctacggaagcagccggg

SEQ ID NO: 229 - DNA, 20 bp, Homo sapiens
gctcgtaggtgaaggcctcc

SEQ ID NO: 230 - DNA, 20 bp, Homo sapiens
gggccggcgctcgtaggtga

SEQ ID NO: 231 - DNA, 20 bp, Homo sapiens
ggactggggccggcgctcgt

SEQ ID NO: 232 - DNA, 20 bp, Homo sapiens
aggccttcacctacgagcgc

SEQ ID NO: 233 - DNA, 20 bp, Homo sapiens
tgtaggcctgggactggggc

SEQ ID NO: 234 - DNA, 20 bp, Homo sapiens
gggatgtaggcctgggactg

SEQ ID NO: 235 - DNA, 20 bp, Homo sapiens
cgagcgccggccccagtccc

SEQ ID NO: 236 - DNA, 20 bp, Homo sapiens
ggggatgtaggcctgggact

SEQ ID NO: 237 - DNA, 20 bp, Homo sapiens
tggggatgtaggcctgggac

SEQ ID NO: 238 - DNA, 20 bp, Homo sapiens
gtccttggggatgtaggcct

SEQ ID NO: 239 - DNA, 20 bp, Homo sapiens
cgtccttggggatgtaggcc

SEQ ID NO: 240 - DNA, 20 bp, Homo sapiens
gccctcgtccttggggatgt

SEQ ID NO: 241 - DNA, 20 bp, Homo sapiens
gtcccaggcctacatcccca

SEQ ID NO: 242 - DNA, 20 bp, Homo sapiens
agaaatcgccctcgtccttg

SEQ ID NO: 243 - DNA, 20 bp, Homo sapiens
tagaaatcgccctcgtcctt

SEQ ID NO: 244 - DNA, 20 bp, Homo sapiens
ggcctacatccccaaggacg

SEQ ID NO: 245 - DNA, 20 bp, Homo sapiens
gtagaaatcgccctcgtcct

SEQ ID NO: 246 - DNA, 20 bp, Homo sapiens
gcctacatccccaaggacga

SEQ ID NO: 247 - DNA, 20 bp, Homo sapiens
cgagggcgatttctactacc

SEQ ID NO: 248 - DNA, 20 bp, Homo sapiens
gagggcgatttctactacct

SEQ ID NO: 249 - DNA, 20 bp, Homo sapiens
agggcgatttctactacctg

SEQ ID NO: 250 - DNA, 20 bp, Homo sapiens
gggcgatttctactacctgg

SEQ ID NO: 251 - DNA, 20 bp, Homo sapiens
ggcgatttctactacctggg

SEQ ID NO: 252 - DNA, 20 bp, Homo sapiens
gcgatttctactacctgggg

SEQ ID NO: 253 - DNA, 20 bp, Homo sapiens
accccccgaagaaccccccc

SEQ ID NO: 254 - DNA, 20 bp, Homo sapiens
tactacctgggggggttctt

SEQ ID NO: 255 - DNA, 20 bp, Homo sapiens
actacctgggggggttcttc

SEQ ID NO: 256 - DNA, 20 bp, Homo sapiens
ctacctgggggggttcttcg

SEQ ID NO: 257 - DNA, 20 bp, Homo sapiens
tacctgggggggttcttcgg

SEQ ID NO: 258 - DNA, 20 bp, Homo sapiens
acctgggggggttcttcggg

SEQ ID NO: 259 - DNA, 20 bp, Homo sapiens
gggggggttcttcggggggt

SEQ ID NO: 260 - DNA, 20 bp, Homo sapiens
cttcggggggtcggtgcaag

SEQ ID NO: 261 - DNA, 20 bp, Homo sapiens
ggtcggtgcaagaggtgcag

SEQ ID NO: 262 - DNA, 20 bp, Homo sapiens
aagaggtgcagcggctcacc

SEQ ID NO: 263 - DNA, 20 bp, Homo sapiens
agaggtgcagcggctcacca

SEQ ID NO: 264 - DNA, 20 bp, Homo sapiens
catggcctggtggcaggccc

SEQ ID NO: 265 - DNA, 20 bp, Homo sapiens
gctcaccagggcctgccacc

SEQ ID NO: 266 - DNA, 20 bp, Homo sapiens
gaccatcatggcctggtggc

SEQ ID NO: 267 - DNA, 20 bp, Homo sapiens
ggtcgaccatcatggcctgg

SEQ ID NO: 268 - DNA, 20 bp, Homo sapiens
cctggtcgaccatcatggcc

SEQ ID NO: 269 - DNA, 20 bp, Homo sapiens
ggcctgccaccaggccatga

SEQ ID NO: 270 - DNA, 20 bp, Homo sapiens
gttggcctggtcgaccatca

SEQ ID NO: 271 - DNA, 20 bp, Homo sapiens
ccaggccatgatggtcgacc

SEQ ID NO: 272 - DNA, 20 bp, Homo sapiens
atgatggtcgaccaggccaa

SEQ ID NO: 273 - DNA, 20 bp, Homo sapiens
cggcctcgatgccgttggcc

SEQ ID NO: 274 - DNA, 20 bp, Homo sapiens
ccacacggcctcgatgccgt

SEQ ID NO: 275 - DNA, 20 bp, Homo sapiens
cgaccaggccaacggcatcg

SEQ ID NO: 276 - DNA, 20 bp, Homo sapiens
ccaacggcatcgaggccgtg

SEQ ID NO: 277 - DNA, 20 bp, Homo sapiens
gtggctctcgtcgtgccaca

SEQ ID NO: 278 - DNA, 20 bp, Homo sapiens
gcagcaggtacttgttcagg

SEQ ID NO: 279 - DNA, 20 bp, Homo sapiens
ggcgcagcaggtacttgttc

SEQ ID NO: 280 - DNA, 20 bp, Homo sapiens
tggtgggtttgtggcgcagc

SEQ ID NO: 281 - DNA, 20 bp, Homo sapiens
agagcaccttggtgggtttg

SEQ ID NO: 282 - DNA, 20 bp, Homo sapiens
gctgcgccacaaacccacca

SEQ ID NO: 283 - DNA, 20 bp, Homo sapiens
tcgggggagagcaccttggt

SEQ ID NO: 284 - DNA, 20 bp, Homo sapiens
ctcgggggagagcaccttgg

SEQ ID NO: 285 - DNA, 20 bp, Homo sapiens
gtactcgggggagagcacct

SEQ ID NO: 286 - DNA, 20 bp, Homo sapiens
ctggtcccacaagtactcgg

SEQ ID NO: 287 - DNA, 20 bp, Homo sapiens
gctggtcccacaagtactcg

SEQ ID NO: 288 - DNA, 20 bp, Homo sapiens
tgctggtcccacaagtactc

SEQ ID NO: 289 - DNA, 20 bp, Homo sapiens
ctgctggtcccacaagtact

SEQ ID NO: 290 - DNA, 20 bp, Homo sapiens
tgctctcccccgagtacttg

SEQ ID NO: 291 - DNA, 20 bp, Homo sapiens
gctctcccccgagtacttgt

SEQ ID NO: 292 - DNA, 20 bp, Homo sapiens
cgggccagcccagcagctgc

SEQ ID NO: 293 - DNA, 20 bp, Homo sapiens
cttgtgggaccagcagctgc

SEQ ID NO: 294 - DNA, 20 bp, Homo sapiens
ttgtgggaccagcagctgct

SEQ ID NO: 295 - DNA, 20 bp, Homo sapiens
gggaccagcagctgctgggc

SEQ ID NO: 296 - DNA, 20 bp, Homo sapiens
ctcagcttcctcaggacggc

SEQ ID NO: 297 - DNA, 20 bp, Homo sapiens
cctcagcttcctcaggacgg

SEQ ID NO: 298 - DNA, 20 bp, Homo sapiens
tgggctggcccgccgtcctg

SEQ ID NO: 299 - DNA, 20 bp, Homo sapiens
gaacctcagcttcctcagga

SEQ ID NO: 300 - DNA, 20 bp, Homo sapiens
cagtgaacctcagcttcctc

SEQ ID NO: 301 - DNA, 20 bp, Homo sapiens
ccgccgtcctgaggaagctg

SEQ ID NO: 302 - DNA, 20 bp, Homo sapiens
gaggaagctgaggttcactg

SEQ ID NO: 303 - DNA, 20 bp, Homo sapiens
cggaccgcctggtggttctt

SEQ ID NO: 304 - DNA, 20 bp, Homo sapiens
ccggaccgcctggtggttct

SEQ ID NO: 305 - DNA, 20 bp, Homo sapiens
tgcggtgcccaagaaccacc

SEQ ID NO: 306 - DNA, 20 bp, Homo sapiens
ggtgcccaagaaccaccagg

SEQ ID NO: 307 - DNA, 20 bp, Homo sapiens
acgggttccggaccgcctgg

SEQ ID NO: 308 - DNA, 20 bp, Homo sapiens
ctcacgggttccggaccgcc

SEQ ID NO: 309 - DNA, 20 bp, Homo sapiens
ccaagaaccaccaggcggtc

SEQ ID NO: 310 - DNA, 20 bp, Homo sapiens
catggctccgcgtctggtct

SEQ ID NO: 311 - DNA, 20 bp, Homo sapiens
ctcggccatggctccgcgtc

SEQ ID NO: 312 - DNA, 20 bp, Homo sapiens
cgagaccagacgcggagcca

SEQ ID NO: 313 - DNA, 20 bp, Homo sapiens
cagacgcggagccatggccg

SEQ ID NO: 314 - DNA, 20 bp, Homo sapiens
cgtccgcaacacctcggcca

SEQ ID NO: 315 - DNA, 20 bp, Homo sapiens
ggccagcgtccgcaacacct

SEQ ID NO: 316 - DNA, 20 bp, Homo sapiens
gagccatggccgaggtgttg

SEQ ID NO: 317 - DNA, 20 bp, Homo sapiens
ggccgaggtgttgcggacgc

SEQ ID NO: 318 - DNA, 20 bp, Homo sapiens
gaggtgttgcggacgctggc

SEQ ID NO: 319 - DNA, 20 bp, Homo sapiens
gggccgaggcctgcactcac

SEQ ID NO: 320 - DNA, 20 bp, Homo sapiens
ggacgctggccggtgagtgc

SEQ ID NO: 321 - DNA, 20 bp, Homo sapiens
tggccggtgagtgcaggcct

SEQ ID NO: 322 - DNA, 20 bp, Homo sapiens
gtgagtgcaggcctcggccc

SEQ ID NO: 323 - DNA, 20 bp, Homo sapiens
ctcgcgggcacccggggccg

SEQ ID NO: 324 - DNA, 20 bp, Homo sapiens
tgagtgcaggcctcggcccc

SEQ ID NO: 325 - DNA, 20 bp, Homo sapiens
ggctccctcgcgggcacccg

SEQ ID NO: 326 - DNA, 20 bp, Homo sapiens
cggctccctcgcgggcaccc

SEQ ID NO: 327 - DNA, 20 bp, Homo sapiens
gcggctccctcgcgggcacc

SEQ ID NO: 328 - DNA, 20 bp, Homo sapiens
ctcggccccgggtgcccgcg

SEQ ID NO: 329 - DNA, 20 bp, Homo sapiens
tcggccccgggtgcccgcga

SEQ ID NO: 330 - DNA, 20 bp, Homo sapiens
tgcggtagcggctccctcgc

SEQ ID NO: 331 - DNA, 20 bp, Homo sapiens
ctgcggtagcggctccctcg

SEQ ID NO: 332 - DNA, 20 bp, Homo sapiens
ccccgcattccctgcggtag

SEQ ID NO: 333 - DNA, 20 bp, Homo sapiens
cgcgagggagccgctaccgc

SEQ ID NO: 334 - DNA, 20 bp, Homo sapiens
gcgagggagccgctaccgca

SEQ ID NO: 335 - DNA, 20 bp, Homo sapiens
ggtgcaccccgcattccctg

SEQ ID NO: 336 - DNA, 20 bp, Homo sapiens
agccgctaccgcagggaatg

SEQ ID NO: 337 - DNA, 20 bp, Homo sapiens
gccgctaccgcagggaatgc

SEQ ID NO: 338 - DNA, 20 bp, Homo sapiens
ccgctaccgcagggaatgcg

SEQ ID NO: 339 - DNA, 20 bp, Homo sapiens
tgcggggtgcacccgacagc

SEQ ID NO: 340 - DNA, 20 bp, Homo sapiens
cccaccccggcccggctgtc

SEQ ID NO: 341 - DNA, 20 bp, Homo sapiens
gcggggtgcacccgacagcc

SEQ ID NO: 342 - DNA, 20 bp, Homo sapiens
ccccaccccggcccggctgt

SEQ ID NO: 343 - DNA, 20 bp, Homo sapiens
ggtgcacccgacagccgggc

SEQ ID NO: 344 - DNA, 20 bp, Homo sapiens
gtgcacccgacagccgggcc

SEQ ID NO: 345 - DNA, 20 bp, Homo sapiens
tgcacccgacagccgggccg

SEQ ID NO: 346 - DNA, 20 bp, Homo sapiens
tgagcgcccccaccccggcc

SEQ ID NO: 347 - DNA, 20 bp, Homo sapiens
acccgacagccgggccgggg

SEQ ID NO: 348 - DNA, 20 bp, Homo sapiens
cccgacagccgggccggggt

SEQ ID NO: 349 - DNA, 20 bp, Homo sapiens
ccgacagccgggccggggtg

SEQ ID NO: 350 - DNA, 20 bp, Homo sapiens
cgacagccgggccggggtgg

SEQ ID NO: 351 - DNA, 20 bp, Homo sapiens
agccctgagcgcccccaccc

SEQ ID NO: 352 - DNA, 20 bp, Homo sapiens
gggccggggtgggggcgctc

SEQ ID NO: 353 - DNA, 20 bp, Homo sapiens
ggccggggtgggggcgctca

SEQ ID NO: 354 - DNA, 20 bp, Homo sapiens
tgggggcgctcagggctgcg

SEQ ID NO: 355 - DNA, 20 bp, Homo sapiens
cgctcagggctgcgaggctt

SEQ ID NO: 356 - DNA, 20 bp, Homo sapiens
gctcagggctgcgaggcttc

SEQ ID NO: 357 - DNA, 20 bp, Homo sapiens
agggctgcgaggcttcgggc

SEQ ID NO: 358 - DNA, 20 bp, Homo sapiens
tcggaggctggggcggcggc

SEQ ID NO: 359 - DNA, 20 bp, Homo sapiens
ggtctcggaggctggggcgg

SEQ ID NO: 360 - DNA, 20 bp, Homo sapiens
cagggtctcggaggctgggg

SEQ ID NO: 361 - DNA, 20 bp, Homo sapiens
acgcagggtctcggaggctg

SEQ ID NO: 362 - DNA, 20 bp, Homo sapiens
gacgcagggtctcggaggct

SEQ ID NO: 363 - DNA, 20 bp, Homo sapiens
ggacgcagggtctcggaggc

SEQ ID NO: 364 - DNA, 20 bp, Homo sapiens
cccaggacgcagggtctcgg

SEQ ID NO: 365 - DNA, 20 bp, Homo sapiens
ctccccaggacgcagggtct

SEQ ID NO: 366 - DNA, 20 bp, Homo sapiens
cgccggctccccaggacgca

SEQ ID NO: 367 - DNA, 20 bp, Homo sapiens
gcctccgagaccctgcgtcc

SEQ ID NO: 368 - DNA, 20 bp, Homo sapiens
ccgccggctccccaggacgc

SEQ ID NO: 369 - DNA, 20 bp, Homo sapiens
cctccgagaccctgcgtcct

SEQ ID NO: 370 - DNA, 20 bp, Homo sapiens
ctccgagaccctgcgtcctg

SEQ ID NO: 371 - DNA, 20 bp, Homo sapiens
cacctgcccgccggctcccc

SEQ ID NO: 372 - DNA, 20 bp, Homo sapiens
gaccctgcgtcctggggagc

SEQ ID NO: 373 - DNA, 20 bp, Homo sapiens
cctgcgtcctggggagccgg

SEQ ID NO: 374 - DNA, 20 bp, Homo sapiens
ctgcgtcctggggagccggc

SEQ ID NO: 375 - DNA, 20 bp, Homo sapiens
gtcctggggagccggcgggc

SEQ ID NO: 376 - DNA, 20 bp, Homo sapiens
ggccgagcccacctgcccgc

SEQ ID NO: 377 - DNA, 20 bp, Homo sapiens
ctggggagccggcgggcagg

SEQ ID NO: 378 - DNA, 20 bp, Homo sapiens
tggggagccggcgggcaggt

SEQ ID NO: 379 - DNA, 20 bp, Homo sapiens
agccggcgggcaggtgggct

SEQ ID NO: 380 - DNA, 20 bp, Homo sapiens
aggtgggctcggccgcgctg

SEQ ID NO: 381 - DNA, 20 bp, Homo sapiens
ggtgggctcggccgcgctgt

SEQ ID NO: 382 - DNA, 20 bp, Homo sapiens
ggtcccaggcacccacagcg

SEQ ID NO: 383 - DNA, 20 bp, Homo sapiens
tcggccgcgctgtgggtgcc

SEQ ID NO: 384 - DNA, 20 bp, Homo sapiens
cggccgcgctgtgggtgcct

SEQ ID NO: 385 - DNA, 20 bp, Homo sapiens
ccatcctccctgcgggtccc

SEQ ID NO: 386 - DNA, 20 bp, Homo sapiens
tgtgggtgcctgggacccgc

SEQ ID NO: 387 - DNA, 20 bp, Homo sapiens
gtgggtgcctgggacccgca

SEQ ID NO: 388 - DNA, 20 bp, Homo sapiens
ggtgcctgggacccgcaggg

SEQ ID NO: 389 - DNA, 20 bp, Homo sapiens
accgcgcccatcctccctgc

SEQ ID NO: 390 - DNA, 20 bp, Homo sapiens
caccgcgcccatcctccctg

SEQ ID NO: 391 - DNA, 20 bp, Homo sapiens
cctgggacccgcagggagga

SEQ ID NO: 392 - DNA, 20 bp, Homo sapiens
ctgggacccgcagggaggat

SEQ ID NO: 393 - DNA, 20 bp, Homo sapiens
acccgcagggaggatgggcg

SEQ ID NO: 394 - DNA, 20 bp, Homo sapiens
cgcagggaggatgggcgcgg

SEQ ID NO: 395 - DNA, 20 bp, Homo sapiens
ggaggatgggcgcggtggcg

SEQ ID NO: 396 - DNA, 20 bp, Homo sapiens
atgggcgcggtggcgcggcc

SEQ ID NO: 397 - DNA, 20 bp, Homo sapiens
ggcgcggtggcgcggcctgg

SEQ ID NO: 398 - DNA, 20 bp, Homo sapiens
gcgcggtggcgcggcctggc

SEQ ID NO: 399 - DNA, 20 bp, Homo sapiens
cgcggtggcgcggcctggcg

SEQ ID NO: 400 - DNA, 20 bp, Homo sapiens
gcggtggcgcggcctggcgg

SEQ ID NO: 401 - DNA, 20 bp, Homo sapiens
cggtggcgcggcctggcggg

SEQ ID NO: 402 - DNA, 20 bp, Homo sapiens
ccggagacgagccccccgcc

SEQ ID NO: 403 - DNA, 20 bp, Homo sapiens
cctggcggggggctcgtctc

SEQ ID NO: 404 - DNA, 20 bp, Homo sapiens
ctggcggggggctcgtctcc

SEQ ID NO: 405 - DNA, 20 bp, Homo sapiens
tggcggggggctcgtctccg

SEQ ID NO: 406 - DNA, 20 bp, Homo sapiens
tcaccaggacccggggaccc

SEQ ID NO: 407 - DNA, 20 bp, Homo sapiens
gggctcgtctccggggtccc

SEQ ID NO: 408 - DNA, 20 bp, Homo sapiens
ggctcgtctccggggtcccc

SEQ ID NO: 409 - DNA, 20 bp, Homo sapiens
cccgctctcaccaggacccg

SEQ ID NO: 410 - DNA, 20 bp, Homo sapiens
tctccggggtccccgggtcc

SEQ ID NO: 411 - DNA, 20 bp, Homo sapiens
ccccgctctcaccaggaccc

SEQ ID NO: 412 - DNA, 20 bp, Homo sapiens
accccgctctcaccaggacc

SEQ ID NO: 413 - DNA, 20 bp, Homo sapiens
cgagggaccccgctctcacc

SEQ ID NO: 414 - DNA, 20 bp, Homo sapiens
tccccgggtcctggtgagag

SEQ ID NO: 415 - DNA, 20 bp, Homo sapiens
ccccgggtcctggtgagagc

SEQ ID NO: 416 - DNA, 20 bp, Homo sapiens
cccgggtcctggtgagagcg

SEQ ID NO: 417 - DNA, 20 bp, Homo sapiens
ggagaccgccacggcgtcga

SEQ ID NO: 418 - DNA, 20 bp, Homo sapiens
tggagaccgccacggcgtcg

SEQ ID NO: 419 - DNA, 20 bp, Homo sapiens
agcggggtccctcgacgccg

SEQ ID NO: 420 - DNA, 20 bp, Homo sapiens
ggggtccctcgacgccgtgg

SEQ ID NO: 421 - DNA, 20 bp, Homo sapiens
ggagaggctggagaccgcca

SEQ ID NO: 422 - DNA, 20 bp, Homo sapiens
gtggaggggcgaggagaggc

SEQ ID NO: 423 - DNA, 20 bp, Homo sapiens
gagcgtggaggggcgaggag

SEQ ID NO: 424 - DNA, 20 bp, Homo sapiens
gcggggagcgtggaggggcg

SEQ ID NO: 425 - DNA, 20 bp, Homo sapiens
ggaaggcggggagcgtggag

SEQ ID NO: 426 - DNA, 20 bp, Homo sapiens
tggaaggcggggagcgtgga

SEQ ID NO: 427 - DNA, 20 bp, Homo sapiens
atggaaggcggggagcgtgg

SEQ ID NO: 428 - DNA, 20 bp, Homo sapiens
ctcatggaaggcggggagcg

SEQ ID NO: 429 - DNA, 20 bp, Homo sapiens
atagcagctcatggaaggcg

SEQ ID NO: 430 - DNA, 20 bp, Homo sapiens
aatagcagctcatggaaggc

SEQ ID NO: 431 - DNA, 20 bp, Homo sapiens
aaatagcagctcatggaagg

SEQ ID NO: 432 - DNA, 20 bp, Homo sapiens
tgaaaatagcagctcatgga

SEQ ID NO: 433 - DNA, 20 bp, Homo sapiens
gtgctgaaaatagcagctca

SEQ ID NO: 434 - DNA, 20 bp, Homo sapiens
ctagtccagggtcgggcggt

SEQ ID NO: 435 - DNA, 20 bp, Homo sapiens
tgtcctagtccagggtcggg

SEQ ID NO: 436 - DNA, 20 bp, Homo sapiens
cagcacctaccgcccgaccc

SEQ ID NO: 437 - DNA, 20 bp, Homo sapiens
ccttgtcctagtccagggtc

SEQ ID NO: 438 - DNA, 20 bp, Homo sapiens
gccttgtcctagtccagggt

SEQ ID NO: 439 - DNA, 20 bp, Homo sapiens
ctaccgcccgaccctggact

SEQ ID NO: 440 - DNA, 20 bp, Homo sapiens
cagagccttgtcctagtcca

SEQ ID NO: 441 - DNA, 20 bp, Homo sapiens
ccagagccttgtcctagtcc

SEQ ID NO: 442 - DNA, 20 bp, Homo sapiens
cccgaccctggactaggaca

SEQ ID NO: 443 - DNA, 20 bp, Homo sapiens
cctggactaggacaaggctc

SEQ ID NO: 444 - DNA, 20 bp, Homo sapiens
ctggactaggacaaggctct

SEQ ID NO: 445 - DNA, 20 bp, Homo sapiens
gaagggctggggggcgggca

SEQ ID NO: 446 - DNA, 20 bp, Homo sapiens
ggaagggctggggggcgggc

SEQ ID NO: 447 - DNA, 20 bp, Homo sapiens
cgagggaagggctggggggc

SEQ ID NO: 448 - DNA, 20 bp, Homo sapiens
ccgagggaagggctgggggg

SEQ ID NO: 449 - DNA, 20 bp, Homo sapiens
tgcccgagggaagggctggg

SEQ ID NO: 450 - DNA, 20 bp, Homo sapiens
gtgcccgagggaagggctgg

SEQ ID NO: 451 - DNA, 20 bp, Homo sapiens
cgtgcccgagggaagggctg

SEQ ID NO: 452 - DNA, 20 bp, Homo sapiens
ccgtgcccgagggaagggct

SEQ ID NO: 453 - DNA, 20 bp, Homo sapiens
gccgtgcccgagggaagggc

SEQ ID NO: 454 - DNA, 20 bp, Homo sapiens
ccgccccccagcccttccct

SEQ ID NO: 455 - DNA, 20 bp, Homo sapiens
ggccgccgtgcccgagggaa

SEQ ID NO: 456 - DNA, 20 bp, Homo sapiens
cgccccccagcccttccctc

SEQ ID NO: 457 - DNA, 20 bp, Homo sapiens
tggccgccgtgcccgaggga

SEQ ID NO: 458 - DNA, 20 bp, Homo sapiens
cgcctggccgccgtgcccga

SEQ ID NO: 459 - DNA, 20 bp, Homo sapiens
cccagcccttccctcgggca

SEQ ID NO: 460 - DNA, 20 bp, Homo sapiens
gcgcctggccgccgtgcccg

SEQ ID NO: 461 - DNA, 20 bp, Homo sapiens
agcccttccctcgggcacgg

SEQ ID NO: 462 - DNA, 20 bp, Homo sapiens
ttccctcgggcacggcggcc

SEQ ID NO: 463 - DNA, 20 bp, Homo sapiens
gggcacggcggccaggcgcc

SEQ ID NO: 464 - DNA, 20 bp, Homo sapiens
tcccggtcaacccgggcgcc

SEQ ID NO: 465 - DNA, 20 bp, Homo sapiens
ggcacggcggccaggcgccc

SEQ ID NO: 466 - DNA, 20 bp, Homo sapiens
aggctgttcccggtcaaccc

SEQ ID NO: 467 - DNA, 20 bp, Homo sapiens
gaggctgttcccggtcaacc

SEQ ID NO: 468 - DNA, 20 bp, Homo sapiens
ggccaggcgcccgggttgac

SEQ ID NO: 469 - DNA, 20 bp, Homo sapiens
gccaggcgcccgggttgacc

SEQ ID NO: 470 - DNA, 20 bp, Homo sapiens
tggggtatggaggctgttcc

SEQ ID NO: 471 - DNA, 20 bp, Homo sapiens
cctccgcgtttggggtatgg

SEQ ID NO: 472 - DNA, 20 bp, Homo sapiens
gcgcctccgcgtttggggta

SEQ ID NO: 473 - DNA, 20 bp, Homo sapiens
cagcctccataccccaaacg

SEQ ID NO: 474 - DNA, 20 bp, Homo sapiens
ccgaggcgcctccgcgtttg

SEQ ID NO: 475 - DNA, 20 bp, Homo sapiens
cccgaggcgcctccgcgttt

SEQ ID NO: 476 - DNA, 20 bp, Homo sapiens
tcccgaggcgcctccgcgtt

SEQ ID NO: 477 - DNA, 20 bp, Homo sapiens
cctccataccccaaacgcgg

SEQ ID NO: 478 - DNA, 20 bp, Homo sapiens
ccccaaacgcggaggcgcct

SEQ ID NO: 479 - DNA, 20 bp, Homo sapiens
cccaaacgcggaggcgcctc

SEQ ID NO: 480 - DNA, 20 bp, Homo sapiens
aacgcggaggcgcctcggga

SEQ ID NO: 481 - DNA, 20 bp, Homo sapiens
ttgcccacctcgccttcccg

SEQ ID NO: 482 - DNA, 20 bp, Homo sapiens
ggaggcgcctcgggaaggcg

SEQ ID NO: 483 - DNA, 20 bp, Homo sapiens
ggcgcctcgggaaggcgagg

SEQ ID NO: 484 - DNA, 20 bp, Homo sapiens
gcgcctcgggaaggcgaggt

SEQ ID NO: 485 - DNA, 20 bp, Homo sapiens
cacagttcccccgtcacgct

SEQ ID NO: 486 - DNA, 20 bp, Homo sapiens
aagttcaatgccaagcgtga

SEQ ID NO: 487 - DNA, 20 bp, Homo sapiens
agttcaatgccaagcgtgac

SEQ ID NO: 488 - DNA, 20 bp, Homo sapiens
gttcaatgccaagcgtgacg

SEQ ID NO: 489 - DNA, 20 bp, Homo sapiens
ttcaatgccaagcgtgacgg

SEQ ID NO: 490 - DNA, 20 bp, Homo sapiens
gtgacgggggaactgtgccc

SEQ ID NO: 491 - DNA, 20 bp, Homo sapiens
tgacgggggaactgtgcccc

SEQ ID NO: 492 - DNA, 20 bp, Homo sapiens
ctatatcacctgagggcccg

SEQ ID NO: 493 - DNA, 20 bp, Homo sapiens
cctatatcacctgagggccc

SEQ ID NO: 494 - DNA, 20 bp, Homo sapiens
tcctatatcacctgagggcc

SEQ ID NO: 495 - DNA, 20 bp, Homo sapiens
gaactgtgccccgggccctc

SEQ ID NO: 496 - DNA, 20 bp, Homo sapiens
ttaactcctatatcacctga

SEQ ID NO: 497 - DNA, 20 bp, Homo sapiens
cttaactcctatatcacctg

SEQ ID NO: 498 - DNA, 20 bp, Homo sapiens
cccgggccctcaggtgatat

SEQ ID NO: 499 - DNA, 20 bp, Homo sapiens
gagttaagaagaaattattg

SEQ ID NO: 500 - DNA, 20 bp, Homo sapiens
attattgaggcaaccagatg

SEQ ID NO: 501 - DNA, 20 bp, Homo sapiens
caggcctgagtcaccgcatc

SEQ ID NO: 502 - DNA, 20 bp, Homo sapiens
gcaaccagatgcggtgactc

SEQ ID NO: 503 - DNA, 20 bp, Homo sapiens
tcccaaagtgctggggttac

SEQ ID NO: 504 - DNA, 20 bp, Homo sapiens
ctcggcctcccaaagtgctg

SEQ ID NO: 505 - DNA, 20 bp, Homo sapiens
cctcggcctcccaaagtgct

SEQ ID NO: 506 - DNA, 20 bp, Homo sapiens
ggcctgtaaccccagcactt

SEQ ID NO: 507 - DNA, 20 bp, Homo sapiens
ccctcggcctcccaaagtgc

SEQ ID NO: 508 - DNA, 20 bp, Homo sapiens
gcctgtaaccccagcacttt

SEQ ID NO: 509 - DNA, 20 bp, Homo sapiens
tgtaaccccagcactttggg

SEQ ID NO: 510 - DNA, 20 bp, Homo sapiens
cccagcactttgggaggccg

SEQ ID NO: 511 - DNA, 20 bp, Homo sapiens
ccagcactttgggaggccga

SEQ ID NO: 512 - DNA, 20 bp, Homo sapiens
gcactttgggaggccgaggg

SEQ ID NO: 513 - DNA, 20 bp, Homo sapiens
aaggacaggtgatccaccct

SEQ ID NO: 514 - DNA, 20 bp, Homo sapiens
gcgccaagaaaattaaggac

SEQ ID NO: 515 - DNA, 20 bp, Homo sapiens
ttctggcgccaagaaaatta

SEQ ID NO: 516 - DNA, 20 bp, Homo sapiens
tcacctgtccttaattttct

SEQ ID NO: 517 - DNA, 20 bp, Homo sapiens
taaatactcaattcatcttc

SEQ ID NO: 518 - DNA, 20 bp, Homo sapiens
ctgaagcgacgttgttgtct

SEQ ID NO: 519 - DNA, 20 bp, Homo sapiens
tctgaagcgacgttgttgtc

SEQ ID NO: 520 - DNA, 20 bp, Homo sapiens
agacaacaacgtcgcttcag

SEQ ID NO: 521 - DNA, 20 bp, Homo sapiens
gacaacaacgtcgcttcaga

SEQ ID NO: 522 - DNA, 20 bp, Homo sapiens
aacaacgtcgcttcagaggg

SEQ ID NO: 523 - DNA, 20 bp, Homo sapiens
acaacgtcgcttcagaggga

SEQ ID NO: 524 - DNA, 20 bp, Homo sapiens
gagggagggatgcagaacgc

SEQ ID NO: 525 - DNA, 20 bp, Homo sapiens
agggagggatgcagaacgca

SEQ ID NO: 526 - DNA, 20 bp, Homo sapiens
ggatgcagaacgcagggcca

SEQ ID NO: 527 - DNA, 20 bp, Homo sapiens
gatgcagaacgcagggccac

SEQ ID NO: 528 - DNA, 20 bp, Homo sapiens
atgcagaacgcagggccacg

SEQ ID NO: 529 - DNA, 20 bp, Homo sapiens
ggcctgcagcctgcaccccg

SEQ ID NO: 530 - DNA, 20 bp, Homo sapiens
aacgcagggccacggggtgc

SEQ ID NO: 531 - DNA, 20 bp, Homo sapiens
ggccacggggtgcaggctgc

SEQ ID NO: 532 - DNA, 20 bp, Homo sapiens
cctttggcgttggggttcac

SEQ ID NO: 533 - DNA, 20 bp, Homo sapiens
ctccctggcctttggcgttg

SEQ ID NO: 534 - DNA, 20 bp, Homo sapiens
tctccctggcctttggcgtt

SEQ ID NO: 535 - DNA, 20 bp, Homo sapiens
ctctccctggcctttggcgt

SEQ ID NO: 536 - DNA, 20 bp, Homo sapiens
ccagtgaaccccaacgccaa

SEQ ID NO: 537 - DNA, 20 bp, Homo sapiens
gaaccccaacgccaaaggcc

SEQ ID NO: 538 - DNA, 20 bp, Homo sapiens
acccggctctccctggcctt

SEQ ID NO: 539 - DNA, 20 bp, Homo sapiens
aaccccaacgccaaaggcca

SEQ ID NO: 540 - DNA, 20 bp, Homo sapiens
gtaccccacccggctctccc

SEQ ID NO: 541 - DNA, 20 bp, Homo sapiens
cgccaaaggccagggagagc

SEQ ID NO: 542 - DNA, 20 bp, Homo sapiens
gccaaaggccagggagagcc

SEQ ID NO: 543 - DNA, 20 bp, Homo sapiens
aaaggccagggagagccggg

SEQ ID NO: 544 - DNA, 20 bp, Homo sapiens
aaggccagggagagccgggt

SEQ ID NO: 545 - DNA, 20 bp, Homo sapiens
aggccagggagagccgggtg

SEQ ID NO: 546 - DNA, 20 bp, Homo sapiens
ctggctctgggtaccccacc

SEQ ID NO: 547 - DNA, 20 bp, Homo sapiens
aagggctgtgtgctggctct

SEQ ID NO: 548 - DNA, 20 bp, Homo sapiens
aaagggctgtgtgctggctc

SEQ ID NO: 549 - DNA, 20 bp, Homo sapiens
taaattaaagggctgtgtgc

SEQ ID NO: 550 - DNA, 20 bp, Homo sapiens
cagcactcctctaaattaaa

SEQ ID NO: 551 - DNA, 20 bp, Homo sapiens
acagcactcctctaaattaa

SEQ ID NO: 552 - DNA, 20 bp, Homo sapiens
cacacagccctttaatttag

SEQ ID NO: 553 - DNA, 20 bp, Homo sapiens
aggagtgctgtgtacacatc

SEQ ID NO: 554 - DNA, 20 bp, Homo sapiens
ggagtgctgtgtacacatct

SEQ ID NO: 555 - DNA, 20 bp, Homo sapiens
gagtgctgtgtacacatctg

SEQ ID NO: 556 - DNA, 20 bp, Homo sapiens
agagatgttttactttgatt

SEQ ID NO: 557 - DNA, 20 bp, Homo sapiens
ttttactttgatttggaatc

SEQ ID NO: 558 - DNA, 20 bp, Homo sapiens
tactttgatttggaatcagg

SEQ ID NO: 559 - DNA, 20 bp, Homo sapiens
tttgatttggaatcaggtgg

SEQ ID NO: 560 - DNA, 20 bp, Homo sapiens
ttggaatcaggtggcggata

SEQ ID NO: 561 - DNA, 20 bp, Homo sapiens
gtggcggataaggcatactg

SEQ ID NO: 562 - DNA, 20 bp, Homo sapiens
aggcatactgaggcctgact

SEQ ID NO: 563 - DNA, 20 bp, Homo sapiens
gcaggagccctcaccaagtc

SEQ ID NO: 564 - DNA, 20 bp, Homo sapiens
tactgaggcctgacttggtg

SEQ ID NO: 565 - DNA, 20 bp, Homo sapiens
actgaggcctgacttggtga

SEQ ID NO: 566 - DNA, 20 bp, Homo sapiens
cttggtgagggctcctgccc

SEQ ID NO: 567 - DNA, 20 bp, Homo sapiens
cagggctgcacctccggggc

SEQ ID NO: 568 - DNA, 20 bp, Homo sapiens
ggtgagggctcctgccccgg

SEQ ID NO: 569 - DNA, 20 bp, Homo sapiens
cctccagggctgcacctccg

SEQ ID NO: 570 - DNA, 20 bp, Homo sapiens
tcctccagggctgcacctcc

SEQ ID NO: 571 - DNA, 20 bp, Homo sapiens
ctcctccagggctgcacctc

SEQ ID NO: 572 - DNA, 20 bp, Homo sapiens
ctgccccggaggtgcagccc

SEQ ID NO: 573 - DNA, 20 bp, Homo sapiens
ccccggaggtgcagccctgg

SEQ ID NO: 574 - DNA, 20 bp, Homo sapiens
ctctgcctcccgctcctcca

SEQ ID NO: 575 - DNA, 20 bp, Homo sapiens
cctctgcctcccgctcctcc

SEQ ID NO: 576 - DNA, 20 bp, Homo sapiens
gaggtgcagccctggaggag

SEQ ID NO: 577 - DNA, 20 bp, Homo sapiens
aggtgcagccctggaggagc

SEQ ID NO: 578 - DNA, 20 bp, Homo sapiens
tgcagccctggaggagcggg

SEQ ID NO: 579 - DNA, 20 bp, Homo sapiens
cctggaggagcgggaggcag

SEQ ID NO: 580 - DNA, 20 bp, Homo sapiens
aggagcgggaggcagaggag

SEQ ID NO: 581 - DNA, 20 bp, Homo sapiens
ggaaaattcatgaagaaaac

SEQ ID NO: 582 - DNA, 20 bp, Homo sapiens
gaaaattcatgaagaaaacc

SEQ ID NO: 583 - DNA, 20 bp, Homo sapiens
ttcatgaagaaaaccgggta

SEQ ID NO: 584 - DNA, 20 bp, Homo sapiens
gcctcgacctacaccatacc

SEQ ID NO: 585 - DNA, 20 bp, Homo sapiens
aagaaaaccgggtatggtgt

SEQ ID NO: 586 - DNA, 20 bp, Homo sapiens
accgggtatggtgtaggtcg

SEQ ID NO: 587 - DNA, 20 bp, Homo sapiens
ggtgagcattactgagggca

SEQ ID NO: 588 - DNA, 20 bp, Homo sapiens
tggtgagcattactgagggc

SEQ ID NO: 589 - DNA, 20 bp, Homo sapiens
caaatggtgagcattactga

SEQ ID NO: 590 - DNA, 20 bp, Homo sapiens
acaaatggtgagcattactg

SEQ ID NO: 591 - DNA, 20 bp, Homo sapiens
tcacagtaaacactgacaaa

SEQ ID NO: 592 - DNA, 20 bp, Homo sapiens
atttgtcagtgtttactgtg

SEQ ID NO: 593 - DNA, 20 bp, Homo sapiens
ttcagtatcgctgagttctc

SEQ ID NO: 594 - DNA, 20 bp, Homo sapiens
gtatcgctgagttctcagga

SEQ ID NO: 595 - DNA, 20 bp, Homo sapiens
gctgagttctcaggaaggaa

SEQ ID NO: 596 - DNA, 20 bp, Homo sapiens
aaggaacggtaaatacttcc

SEQ ID NO: 597 - DNA, 20 bp, Homo sapiens
aggaacggtaaatacttccc

SEQ ID NO: 598 - DNA, 20 bp, Homo sapiens
cgtgggtgaaagaatgaccc

SEQ ID NO: 599 - DNA, 20 bp, Homo sapiens
ccgtgggtgaaagaatgacc

SEQ ID NO: 600 - DNA, 20 bp, Homo sapiens
ccgggtcattctttcaccca

SEQ ID NO: 601 - DNA, 20 bp, Homo sapiens
cgggtcattctttcacccac

SEQ ID NO: 602 - DNA, 20 bp, Homo sapiens
ctccaaacctgttttcccgt

SEQ ID NO: 603 - DNA, 20 bp, Homo sapiens
tctccaaacctgttttcccg

SEQ ID NO: 604 - DNA, 20 bp, Homo sapiens
tctttcacccacgggaaaac

SEQ ID NO: 605 - DNA, 20 bp, Homo sapiens
cacccacgggaaaacaggtt

SEQ ID NO: 606 - DNA, 20 bp, Homo sapiens
aaaacaggtttggagagatc

SEQ ID NO: 607 - DNA, 20 bp, Homo sapiens
aaacaggtttggagagatct

SEQ ID NO: 608 - DNA, 20 bp, Homo sapiens
agagatctgggacagtgctc

SEQ ID NO: 609 - DNA, 20 bp, Homo sapiens
tgggacagtgctctggtcct

SEQ ID NO: 610 - DNA, 20 bp, Homo sapiens
acagtgctctggtcctaggc

SEQ ID NO: 611 - DNA, 20 bp, Homo sapiens
ccactcagcccttcctgcct

SEQ ID NO: 612 - DNA, 20 bp, Homo sapiens
tgctctggtcctaggcagga

SEQ ID NO: 613 - DNA, 20 bp, Homo sapiens
gctctggtcctaggcaggaa

SEQ ID NO: 614 - DNA, 20 bp, Homo sapiens
cctaggcaggaagggctgag

SEQ ID NO: 615 - DNA, 20 bp, Homo sapiens
ctaggcaggaagggctgagt

SEQ ID NO: 616 - DNA, 20 bp, Homo sapiens
taggcaggaagggctgagtg

SEQ ID NO: 617 - DNA, 20 bp, Homo sapiens
aggaagggctgagtggggcc

SEQ ID NO: 618 - DNA, 20 bp, Homo sapiens
ggaagggctgagtggggcct

SEQ ID NO: 619 - DNA, 20 bp, Homo sapiens
tgcagtcagacctgagtccc

SEQ ID NO: 620 - DNA, 20 bp, Homo sapiens
ctgagtggggcctgggactc

SEQ ID NO: 621 - DNA, 20 bp, Homo sapiens
tggcagcacagggaggaggc

SEQ ID NO: 622 - DNA, 20 bp, Homo sapiens
gcgctggcagcacagggagg

SEQ ID NO: 623 - DNA, 20 bp, Homo sapiens
aaggcgctggcagcacaggg

SEQ ID NO: 624 - DNA, 20 bp, Homo sapiens
cggaaggcgctggcagcaca

SEQ ID NO: 625 - DNA, 20 bp, Homo sapiens
ccggaaggcgctggcagcac

SEQ ID NO: 626 - DNA, 20 bp, Homo sapiens
gggaagaacccggaaggcgc

SEQ ID NO: 627 - DNA, 20 bp, Homo sapiens
cctgtgctgccagcgccttc

SEQ ID NO: 628 - DNA, 20 bp, Homo sapiens
ctgtgctgccagcgccttcc

SEQ ID NO: 629 - DNA, 20 bp, Homo sapiens
gggacagggaagaacccgga

SEQ ID NO: 630 - DNA, 20 bp, Homo sapiens
aggagggacagggaagaacc

SEQ ID NO: 631 - DNA, 20 bp, Homo sapiens
aagaccacaaaggagggaca

SEQ ID NO: 632 - DNA, 20 bp, Homo sapiens
aaagaccacaaaggagggac

SEQ ID NO: 633 - DNA, 20 bp, Homo sapiens
aaaacaaagaccacaaagga

SEQ ID NO: 634 - DNA, 20 bp, Homo sapiens
tcttccctgtccctcctttg

SEQ ID NO: 635 - DNA, 20 bp, Homo sapiens
gaaaacaaagaccacaaagg

SEQ ID NO: 636 - DNA, 20 bp, Homo sapiens
agggaaaacaaagaccacaa

SEQ ID NO: 637 - DNA, 20 bp, Homo sapiens
aaacatattaagacaaaaaa

SEQ ID NO: 638 - DNA, 20 bp, Homo sapiens
gaaacatattaagacaaaaa

SEQ ID NO: 639 - DNA, 20 bp, Homo sapiens
tttgtcttaatatgtttcaa

SEQ ID NO: 640 - DNA, 20 bp, Homo sapiens
ccagctgtacctttcatgtg

SEQ ID NO: 641 - DNA, 20 bp, Homo sapiens
tacaataaaccgcacatgaa

SEQ ID NO: 642 - DNA, 20 bp, Homo sapiens
ccgcacatgaaaggtacagc

SEQ ID NO: 643 - DNA, 20 bp, Homo sapiens
ctgtgttcatcatcttgact

SEQ ID NO: 644 - DNA, 20 bp, Homo sapiens
gctgtgttcatcatcttgac

SEQ ID NO: 645 - DNA, 20 bp, Homo sapiens
atgaacacagctgccacccc

SEQ ID NO: 646 - DNA, 20 bp, Homo sapiens
ggcaggacagactcctgggg

SEQ ID NO: 647 - DNA, 20 bp, Homo sapiens
tggggcaggacagactcctg

SEQ ID NO: 648 - DNA, 20 bp, Homo sapiens
gtggggcaggacagactcct

SEQ ID NO: 649 - DNA, 20 bp, Homo sapiens
cgtggggcaggacagactcc

SEQ ID NO: 650 - DNA, 20 bp, Homo sapiens
caggagtctgtcctgcccca

SEQ ID NO: 651 - DNA, 20 bp, Homo sapiens
gacagcataacccgtggggc

SEQ ID NO: 652 - DNA, 20 bp, Homo sapiens
aggagtctgtcctgccccac

SEQ ID NO: 653 - DNA, 20 bp, Homo sapiens
ctaagacagcataacccgtg

SEQ ID NO: 654 - DNA, 20 bp, Homo sapiens
actaagacagcataacccgt

SEQ ID NO: 655 - DNA, 20 bp, Homo sapiens
aactaagacagcataacccg

SEQ ID NO: 656 - DNA, 20 bp, Homo sapiens
acgggttatgctgtcttagt

SEQ ID NO: 657 - DNA, 20 bp, Homo sapiens
gtcttagttggtctcatgtc

SEQ ID NO: 658 - DNA, 20 bp, Homo sapiens
tcttagttggtctcatgtca

SEQ ID NO: 659 - DNA, 20 bp, Homo sapiens
ggtctcatgtcagggagcct

SEQ ID NO: 660 - DNA, 20 bp, Homo sapiens
ctcatgtcagggagccttgg

SEQ ID NO: 661 - DNA, 20 bp, Homo sapiens
tgcccgaccctggtcctcca

SEQ ID NO: 662 - DNA, 20 bp, Homo sapiens
tcagggagccttggaggacc

SEQ ID NO: 663 - DNA, 20 bp, Homo sapiens
cagggagccttggaggacca

SEQ ID NO: 664 - DNA, 20 bp, Homo sapiens
gagccttggaggaccagggt

SEQ ID NO: 665 - DNA, 20 bp, Homo sapiens
agccttggaggaccagggtc

SEQ ID NO: 666 - DNA, 20 bp, Homo sapiens
agagaccaactgcccgaccc

SEQ ID NO: 667 - DNA, 20 bp, Homo sapiens
gaggaccagggtcgggcagt

SEQ ID NO: 668 - DNA, 20 bp, Homo sapiens
gcagttggtctctatactcc

SEQ ID NO: 669 - DNA, 20 bp, Homo sapiens
cagttggtctctatactcct

SEQ ID NO: 670 - DNA, 20 bp, Homo sapiens
agttggtctctatactcctg

SEQ ID NO: 671 - DNA, 20 bp, Homo sapiens
agagccagtgccagaacccc

SEQ ID NO: 672 - DNA, 20 bp, Homo sapiens
tctctatactcctggggttc

SEQ ID NO: 673 - DNA, 20 bp, Homo sapiens
tactcctggggttctggcac

SEQ ID NO: 674 - DNA, 20 bp, Homo sapiens
tggggttctggcactggctc

SEQ ID NO: 675 - DNA, 20 bp, Homo sapiens
tttgtcttgggtgcggtcat

SEQ ID NO: 676 - DNA, 20 bp, Homo sapiens
gtttgtcttgggtgcggtca

SEQ ID NO: 677 - DNA, 20 bp, Homo sapiens
caagacgtttgtcttgggtg

SEQ ID NO: 678 - DNA, 20 bp, Homo sapiens
gtcttcaagacgtttgtctt

SEQ ID NO: 679 - DNA, 20 bp, Homo sapiens
agtcttcaagacgtttgtct

SEQ ID NO: 680 - DNA, 20 bp, Homo sapiens
caaacgtcttgaagactaag

SEQ ID NO: 681 - DNA, 20 bp, Homo sapiens
gtcttgaagactaagaggtt

SEQ ID NO: 682 - DNA, 20 bp, Homo sapiens
ggttaggtctttgagaaacc

SEQ ID NO: 683 - DNA, 20 bp, Homo sapiens
agaatgggcactcatttgcc

SEQ ID NO: 684 - DNA, 20 bp, Homo sapiens
gcaaatgagtgcccattctc

SEQ ID NO: 685 - DNA, 20 bp, Homo sapiens
aatgtgggtaacctgagaat

SEQ ID NO: 686 - DNA, 20 bp, Homo sapiens
gaatgtgggtaacctgagaa

SEQ ID NO: 687 - DNA, 20 bp, Homo sapiens
taaatcaacatgcagaatgt

SEQ ID NO: 688 - DNA, 20 bp, Homo sapiens
ctaaatcaacatgcagaatg

SEQ ID NO: 689 - DNA, 20 bp, Homo sapiens
agtgttcaaccaacattggt

SEQ ID NO: 690 - DNA, 20 bp, Homo sapiens
tttagtcatccaaccaatgt

SEQ ID NO: 691 - DNA, 20 bp, Homo sapiens
catcagtgttcaaccaacat

SEQ ID NO: 692 - DNA, 20 bp, Homo sapiens
gaacactgatgagaacaagc

SEQ ID NO: 693 - DNA, 20 bp, Homo sapiens
ctgcaggcaccttctagcac

SEQ ID NO: 694 - DNA, 20 bp, Homo sapiens
acaagcaggcctgtgctaga

SEQ ID NO: 695 - DNA, 20 bp, Homo sapiens
gctagaaggtgcctgcagcc

SEQ ID NO: 696 - DNA, 20 bp, Homo sapiens
gctcaccagctcctggctgc

SEQ ID NO: 697 - DNA, 20 bp, Homo sapiens
aggtgcctgcagccaggagc

SEQ ID NO: 698 - DNA, 20 bp, Homo sapiens
gacaccagctcaccagctcc

SEQ ID NO: 699 - DNA, 20 bp, Homo sapiens
gcagccaggagctggtgagc

SEQ ID NO: 700 - DNA, 20 bp, Homo sapiens
gctggtgagctggtgtcctt

SEQ ID NO: 701 - DNA, 20 bp, Homo sapiens
ctggtgagctggtgtcctta

SEQ ID NO: 702 - DNA, 20 bp, Homo sapiens
cctcgccattggtgtcccta

SEQ ID NO: 703 - DNA, 20 bp, Homo sapiens
ggtgtccttagggacaccaa

SEQ ID NO: 704 - DNA, 20 bp, Homo sapiens
ccttagggacaccaatggcg

SEQ ID NO: 705 - DNA, 20 bp, Homo sapiens
cacactgggtccctcgccat

SEQ ID NO: 706 - DNA, 20 bp, Homo sapiens
cttagggacaccaatggcga

SEQ ID NO: 707 - DNA, 20 bp, Homo sapiens
atggcgagggacccagtgtg

SEQ ID NO: 708 - DNA, 20 bp, Homo sapiens
cccccagatttccacacact

SEQ ID NO: 709 - DNA, 20 bp, Homo sapiens
tcccccagatttccacacac

SEQ ID NO: 710 - DNA, 20 bp, Homo sapiens
ggacccagtgtgtggaaatc

SEQ ID NO: 711 - DNA, 20 bp, Homo sapiens
gacccagtgtgtggaaatct

SEQ ID NO: 712 - DNA, 20 bp, Homo sapiens
acccagtgtgtggaaatctg

SEQ ID NO: 713 - DNA, 20 bp, Homo sapiens
cccagtgtgtggaaatctgg

SEQ ID NO: 714 - DNA, 20 bp, Homo sapiens
atctgggggacaagcatgcc

SEQ ID NO: 715 - DNA, 20 bp, Homo sapiens
tctgggggacaagcatgcca

SEQ ID NO: 716 - DNA, 20 bp, Homo sapiens
cccatgtgagctcttctccc

SEQ ID NO: 717 - DNA, 20 bp, Homo sapiens
gccagggagaagagctcaca

SEQ ID NO: 718 - DNA, 20 bp, Homo sapiens
ccagggagaagagctcacat

SEQ ID NO: 719 - DNA, 20 bp, Homo sapiens
cagggagaagagctcacatg

SEQ ID NO: 720 - DNA, 20 bp, Homo sapiens
gagaagagctcacatgggga

SEQ ID NO: 721 - DNA, 20 bp, Homo sapiens
gagctcacatggggaaggcc

SEQ ID NO: 722 - DNA, 20 bp, Homo sapiens
cctgactgatttgtggagcc

SEQ ID NO: 723 - DNA, 20 bp, Homo sapiens
gcctgactgatttgtggagc

SEQ ID NO: 724 - DNA, 20 bp, Homo sapiens
caacaagcctgactgatttg

SEQ ID NO: 725 - DNA, 20 bp, Homo sapiens
cccggctccacaaatcagtc

SEQ ID NO: 726 - DNA, 20 bp, Homo sapiens
cacaaatcagtcaggcttgt

SEQ ID NO: 727 - DNA, 20 bp, Homo sapiens
acaaatcagtcaggcttgtt

SEQ ID NO: 728 - DNA, 20 bp, Homo sapiens
caaatcagtcaggcttgttg

SEQ ID NO: 729 - DNA, 20 bp, Homo sapiens
atcagtcaggcttgttgggg

SEQ ID NO: 730 - DNA, 20 bp, Homo sapiens
tcagtcaggcttgttggggc

SEQ ID NO: 731 - DNA, 20 bp, Homo sapiens
tcaggcttgttggggcgggc

SEQ ID NO: 732 - DNA, 20 bp, Homo sapiens
gttggggcgggcaggagagc

SEQ ID NO: 733 - DNA, 20 bp, Homo sapiens
ttggggcgggcaggagagca

SEQ ID NO: 734 - DNA, 20 bp, Homo sapiens
cgggcaggagagcagggtag

SEQ ID NO: 735 - DNA, 20 bp, Homo sapiens
gagcagggtagtggagtcag

SEQ ID NO: 736 - DNA, 20 bp, Homo sapiens
agcagggtagtggagtcaga

SEQ ID NO: 737 - DNA, 20 bp, Homo sapiens
agagggagtgatcccccgaa

SEQ ID NO: 738 - DNA, 20 bp, Homo sapiens
gtcctcttcctgcctttcgg

SEQ ID NO: 739 - DNA, 20 bp, Homo sapiens
tgtcctcttcctgcctttcg

SEQ ID NO: 740 - DNA, 20 bp, Homo sapiens
atgtcctcttcctgcctttc

SEQ ID NO: 741 - DNA, 20 bp, Homo sapiens
ggagtgatcccccgaaaggc

SEQ ID NO: 742 - DNA, 20 bp, Homo sapiens
catgtcctcttcctgccttt

SEQ ID NO: 743 - DNA, 20 bp, Homo sapiens
atcccccgaaaggcaggaag

SEQ ID NO: 744 - DNA, 20 bp, Homo sapiens
aagaggacatgagagagcct

SEQ ID NO: 745 - DNA, 20 bp, Homo sapiens
catcctcaccgtcatctcca

SEQ ID NO: 746 - DNA, 20 bp, Homo sapiens
tgagagagccttggagatga

SEQ ID NO: 747 - DNA, 20 bp, Homo sapiens
gagccttggagatgacggtg

SEQ ID NO: 748 - DNA, 20 bp, Homo sapiens
tggagatgacggtgaggatg

SEQ ID NO: 749 - DNA, 20 bp, Homo sapiens
gatgacggtgaggatgtggt

SEQ ID NO: 750 - DNA, 20 bp, Homo sapiens
gacggtgaggatgtggttgg

SEQ ID NO: 751 - DNA, 20 bp, Homo sapiens
acggtgaggatgtggttggt

SEQ ID NO: 752 - DNA, 20 bp, Homo sapiens
gtgaggatgtggttggtggg

SEQ ID NO: 753 - DNA, 20 bp, Homo sapiens
gtggttggtgggcggtgagc

SEQ ID NO: 754 - DNA, 20 bp, Homo sapiens
tggttggtgggcggtgagct

SEQ ID NO: 755 - DNA, 20 bp, Homo sapiens
gtgagctgggtgtcatgtgc

SEQ ID NO: 756 - DNA, 20 bp, Homo sapiens
aaggagctgagcattctcta

SEQ ID NO: 757 - DNA, 20 bp, Homo sapiens
agggattatgatgggtgtga

SEQ ID NO: 758 - DNA, 20 bp, Homo sapiens
agtcctccagggattatgat

SEQ ID NO: 759 - DNA, 20 bp, Homo sapiens
cagtcctccagggattatga

SEQ ID NO: 760 - DNA, 20 bp, Homo sapiens
ttcacacccatcataatccc

SEQ ID NO: 761 - DNA, 20 bp, Homo sapiens
acacccatcataatccctgg

SEQ ID NO: 762 - DNA, 20 bp, Homo sapiens
cacgtggtctcagtcctcca

SEQ ID NO: 763 - DNA, 20 bp, Homo sapiens
gcacgtggtctcagtcctcc

SEQ ID NO: 764 - DNA, 20 bp, Homo sapiens
ggaggactgagaccacgtgc

SEQ ID NO: 765 - DNA, 20 bp, Homo sapiens
gcttccaaaactcctgcacg

SEQ ID NO: 766 - DNA, 20 bp, Homo sapiens
gagaccacgtgcaggagttt

SEQ ID NO: 767 - DNA, 20 bp, Homo sapiens
cgtgcaggagttttggaagc

SEQ ID NO: 768 - DNA, 20 bp, Homo sapiens
gctggcagtgcacccagtcc

SEQ ID NO: 769 - DNA, 20 bp, Homo sapiens
aatggaggagagccgggact

SEQ ID NO: 770 - DNA, 20 bp, Homo sapiens
gaatggaggagagccgggac

SEQ ID NO: 771 - DNA, 20 bp, Homo sapiens
caccagaatggaggagagcc

SEQ ID NO: 772 - DNA, 20 bp, Homo sapiens
ccaccagaatggaggagagc

SEQ ID NO: 773 - DNA, 20 bp, Homo sapiens
gtcccggctctcctccattc

SEQ ID NO: 774 - DNA, 20 bp, Homo sapiens
ggtgagacccaccagaatgg

SEQ ID NO: 775 - DNA, 20 bp, Homo sapiens
ccggctctcctccattctgg

SEQ ID NO: 776 - DNA, 20 bp, Homo sapiens
tctggtgagacccaccagaa

SEQ ID NO: 777 - DNA, 20 bp, Homo sapiens
cggctctcctccattctggt

SEQ ID NO: 778 - DNA, 20 bp, Homo sapiens
tggtgggtctcaccagagat

SEQ ID NO: 779 - DNA, 20 bp, Homo sapiens
atctcttcttggccaatctc

SEQ ID NO: 780 - DNA, 20 bp, Homo sapiens
ggaacagtttgatctcttct

SEQ ID NO: 781 - DNA, 20 bp, Homo sapiens
agaagagatcaaactgttcc

SEQ ID NO: 782 - DNA, 20 bp, Homo sapiens
ccccaccctcagtttggtcc

SEQ ID NO: 783 - DNA, 20 bp, Homo sapiens
actgttcctggaccaaactg

SEQ ID NO: 784 - DNA, 20 bp, Homo sapiens
ctgttcctggaccaaactga

SEQ ID NO: 785 - DNA, 20 bp, Homo sapiens
tagcagccccaccctcagtt

SEQ ID NO: 786 - DNA, 20 bp, Homo sapiens
ttcctggaccaaactgaggg

SEQ ID NO: 787 - DNA, 20 bp, Homo sapiens
tcctggaccaaactgagggt

SEQ ID NO: 788 - DNA, 20 bp, Homo sapiens
cctggaccaaactgagggtg

SEQ ID NO: 789 - DNA, 20 bp, Homo sapiens
ggtggggctgctatctctcg

SEQ ID NO: 790 - DNA, 20 bp, Homo sapiens
ttcatctgcatctcgttatt

SEQ ID NO: 791 - DNA, 20 bp, Homo sapiens
gttcatctgcatctcgttat

SEQ ID NO: 792 - DNA, 20 bp, Homo sapiens
ataacgagatgcagatgaac

SEQ ID NO: 793 - DNA, 20 bp, Homo sapiens
taacgagatgcagatgaact

SEQ ID NO: 794 - DNA, 20 bp, Homo sapiens
aacgagatgcagatgaactg

SEQ ID NO: 795 - DNA, 20 bp, Homo sapiens
tatttctgtaaccagttaca

SEQ ID NO: 796 - DNA, 20 bp, Homo sapiens
ccaggtcttctccttgtaac

SEQ ID NO: 797 - DNA, 20 bp, Homo sapiens
ccagttacaaggagaagacc

SEQ ID NO: 798 - DNA, 20 bp, Homo sapiens
ttggtctggagataatttcc

SEQ ID NO: 799 - DNA, 20 bp, Homo sapiens
tttgtaattttgagttggtc

SEQ ID NO: 800 - DNA, 20 bp, Homo sapiens
aaaactttgtaattttgagt

SEQ ID NO: 801 - DNA, 20 bp, Homo sapiens
cttagaaggtatataagctc

SEQ ID NO: 802 - DNA, 20 bp, Homo sapiens
acatagacatatagcttaga

SEQ ID NO: 803 - DNA, 20 bp, Homo sapiens
cttatgttaatctataacta

SEQ ID NO: 804 - DNA, 20 bp, Homo sapiens
ggatccagaggaaggtcttc

SEQ ID NO: 805 - DNA, 20 bp, Homo sapiens
gagtcctgaagaccttcctc

SEQ ID NO: 806 - DNA, 20 bp, Homo sapiens
tttactgaggatccagagga

SEQ ID NO: 807 - DNA, 20 bp, Homo sapiens
taaatttactgaggatccag

SEQ ID NO: 808 - DNA, 20 bp, Homo sapiens
tagattaagtaaatttactg

SEQ ID NO: 809 - DNA, 20 bp, Homo sapiens
tgatttaggagacaagataa

SEQ ID NO: 810 - DNA, 20 bp, Homo sapiens
atgatttaggagacaagata

SEQ ID NO: 811 - DNA, 20 bp, Homo sapiens
ttatcttgtctcctaaatca

SEQ ID NO: 812 - DNA, 20 bp, Homo sapiens
ttcccaaacccccatgattt

SEQ ID NO: 813 - DNA, 20 bp, Homo sapiens
tatcttgtctcctaaatcat

SEQ ID NO: 814 - DNA, 20 bp, Homo sapiens
atcttgtctcctaaatcatg

SEQ ID NO: 815 - DNA, 20 bp, Homo sapiens
tcttgtctcctaaatcatgg

SEQ ID NO: 816 - DNA, 20 bp, Homo sapiens
tctcctaaatcatgggggtt

SEQ ID NO: 817 - DNA, 20 bp, Homo sapiens
ctcctaaatcatgggggttt

SEQ ID NO: 818 - DNA, 20 bp, Homo sapiens
taagtttactgggggtctga

SEQ ID NO: 819 - DNA, 20 bp, Homo sapiens
tccacaaataagtttactgg

SEQ ID NO: 820 - DNA, 20 bp, Homo sapiens
ctccacaaataagtttactg

SEQ ID NO: 821 - DNA, 20 bp, Homo sapiens
actccacaaataagtttact

SEQ ID NO: 822 - DNA, 20 bp, Homo sapiens
gactccacaaataagtttac

SEQ ID NO: 823 - DNA, 20 bp, Homo sapiens
acccccagtaaacttatttg

SEQ ID NO: 824 - DNA, 20 bp, Homo sapiens
taaacttatttgtggagtcc

SEQ ID NO: 825 - DNA, 20 bp, Homo sapiens
aaacttatttgtggagtcct

SEQ ID NO: 826 - DNA, 20 bp, Homo sapiens
aacttatttgtggagtcctg

SEQ ID NO: 827 - DNA, 20 bp, Homo sapiens
gggatctgaagaaattcccc

SEQ ID NO: 828 - DNA, 20 bp, Homo sapiens
ggattaaacaagttttattg

SEQ ID NO: 829 - DNA, 20 bp, Homo sapiens
aggattaaacaagttttatt

SEQ ID NO: 830 - DNA, 20 bp, Homo sapiens
taggattaaacaagttttat

SEQ ID NO: 831 - DNA, 20 bp, Homo sapiens
aaaacttgtttaatcctaaa

SEQ ID NO: 832 - DNA, 20 bp, Homo sapiens
aaacttgtttaatcctaaat

SEQ ID NO: 833 - DNA, 20 bp, Homo sapiens
attcttaacaggacccattt

SEQ ID NO: 834 - DNA, 20 bp, Homo sapiens
ataacgaaggaattcttaac

SEQ ID NO: 835 - DNA, 20 bp, Homo sapiens
caagcatgacaaaataacga

SEQ ID NO: 836 - DNA, 20 bp, Homo sapiens
cgttattttgtcatgcttga

SEQ ID NO: 837 - DNA, 20 bp, Homo sapiens
tttgtcatgcttgaaggccc

SEQ ID NO: 838 - DNA, 20 bp, Homo sapiens
catgcttgaaggcccaggaa

SEQ ID NO: 839 - DNA, 20 bp, Homo sapiens
gttttgcctagacctttcct

SEQ ID NO: 840 - DNA, 20 bp, Homo sapiens
agttttgcctagacctttcc

SEQ ID NO: 841 - DNA, 20 bp, Homo sapiens
tgaaggcccaggaaaggtct

SEQ ID NO: 842 - DNA, 20 bp, Homo sapiens
aaaggtctaggcaaaactct

SEQ ID NO: 843 - DNA, 20 bp, Homo sapiens
ggtctaggcaaaactcttgg

SEQ ID NO: 844 - DNA, 20 bp, Homo sapiens
gtctaggcaaaactcttggt

SEQ ID NO: 845 - DNA, 20 bp, Homo sapiens
cagtgcccttataaaaaggc

SEQ ID NO: 846 - DNA, 20 bp, Homo sapiens
aagccagtgcccttataaaa

SEQ ID NO: 847 - DNA, 20 bp, Homo sapiens
tatattccagcctttttata

SEQ ID NO: 848 - DNA, 20 bp, Homo sapiens
atattccagcctttttataa

SEQ ID NO: 849 - DNA, 20 bp, Homo sapiens
cagcctttttataagggcac

SEQ ID NO: 850 - DNA, 20 bp, Homo sapiens
ctgtttcagtactgactgag

SEQ ID NO: 851 - DNA, 20 bp, Homo sapiens
tcagtactgaaacagttgtt

SEQ ID NO: 852 - DNA, 20 bp, Homo sapiens
cagtactgaaacagttgtta

SEQ ID NO: 853 - DNA, 20 bp, Homo sapiens
tactgaaacagttgttaggg

SEQ ID NO: 854 - DNA, 20 bp, Homo sapiens
aggtcaggtctcactaacgc

SEQ ID NO: 855 - DNA, 20 bp, Homo sapiens
aagatgtgttgtggcaggtc

SEQ ID NO: 856 - DNA, 20 bp, Homo sapiens
cgagtaagatgtgttgtggc

SEQ ID NO: 857 - DNA, 20 bp, Homo sapiens
attccgagtaagatgtgttg

SEQ ID NO: 858 - DNA, 20 bp, Homo sapiens
ctgccacaacacatcttact

SEQ ID NO: 859 - DNA, 20 bp, Homo sapiens
agctgattttttgaagttat

SEQ ID NO: 860 - DNA, 20 bp, Homo sapiens
aagctgattttttgaagtta

SEQ ID NO: 861 - DNA, 20 bp, Homo sapiens
cttcaaaaaatcagctttga

SEQ ID NO: 862 - DNA, 20 bp, Homo sapiens
gatgctaggtgtgttcagta

SEQ ID NO: 863 - DNA, 20 bp, Homo sapiens
agatgctaggtgtgttcagt

SEQ ID NO: 864 - DNA, 20 bp, Homo sapiens
gctgaaggaagagagatgct

SEQ ID NO: 865 - DNA, 20 bp, Homo sapiens
gccccttgaccctaagctga

SEQ ID NO: 866 - DNA, 20 bp, Homo sapiens
catctctcttccttcagctt

SEQ ID NO: 867 - DNA, 20 bp, Homo sapiens
atctctcttccttcagctta

SEQ ID NO: 868 - DNA, 20 bp, Homo sapiens
cttccttcagcttagggtca

SEQ ID NO: 869 - DNA, 20 bp, Homo sapiens
ttccttcagcttagggtcaa

SEQ ID NO: 870 - DNA, 20 bp, Homo sapiens
tccttcagcttagggtcaag

SEQ ID NO: 871 - DNA, 20 bp, Homo sapiens
tcagcttagggtcaaggggc

SEQ ID NO: 872 - DNA, 20 bp, Homo sapiens
cagcttagggtcaaggggct

SEQ ID NO: 873 - DNA, 20 bp, Homo sapiens
agcttagggtcaaggggctg

SEQ ID NO: 874 - DNA, 20 bp, Homo sapiens
ggtcaaggggctggggttga

SEQ ID NO: 875 - DNA, 20 bp, Homo sapiens
aataaagctgtttctttcaa

SEQ ID NO: 876 - DNA, 20 bp, Homo sapiens
tttatggcatatcaatgaca

SEQ ID NO: 877 - DNA, 20 bp, Homo sapiens
tttgaaacaggtgaatttta

SEQ ID NO: 878 - DNA, 20 bp, Homo sapiens
gaaaataattcatttgaaac

SEQ ID NO: 879 - DNA, 20 bp, Homo sapiens
gagttttggtgggctgggga

SEQ ID NO: 880 - DNA, 20 bp, Homo sapiens
cagggagttttggtgggctg

SEQ ID NO: 881 - DNA, 20 bp, Homo sapiens
ccagggagttttggtgggct

SEQ ID NO: 882 - DNA, 20 bp, Homo sapiens
tccagggagttttggtgggc

SEQ ID NO: 883 - DNA, 20 bp, Homo sapiens
gagttccagggagttttggt

SEQ ID NO: 884 - DNA, 20 bp, Homo sapiens
ggagttccagggagttttgg

SEQ ID NO: 885 - DNA, 20 bp, Homo sapiens
ggaggagttccagggagttt

SEQ ID NO: 886 - DNA, 20 bp, Homo sapiens
cccagcccaccaaaactccc

SEQ ID NO: 887 - DNA, 20 bp, Homo sapiens
atgactgcggaggagttcca

SEQ ID NO: 888 - DNA, 20 bp, Homo sapiens
aatgactgcggaggagttcc

SEQ ID NO: 889 - DNA, 20 bp, Homo sapiens
ggaatggggaatgactgcgg

SEQ ID NO: 890 - DNA, 20 bp, Homo sapiens
gtgggaatggggaatgactg

SEQ ID NO: 891 - DNA, 20 bp, Homo sapiens
tctgaggccaggtgggaatg

SEQ ID NO: 892 - DNA, 20 bp, Homo sapiens
gtctgaggccaggtgggaat

SEQ ID NO: 893 - DNA, 20 bp, Homo sapiens
tgtctgaggccaggtgggaa

SEQ ID NO: 894 - DNA, 20 bp, Homo sapiens
agtcattccccattcccacc

SEQ ID NO: 895 - DNA, 20 bp, Homo sapiens
gtgattgtctgaggccaggt

SEQ ID NO: 896 - DNA, 20 bp, Homo sapiens
agtgattgtctgaggccagg

SEQ ID NO: 897 - DNA, 20 bp, Homo sapiens
gaaagtgattgtctgaggcc

SEQ ID NO: 898 - DNA, 20 bp, Homo sapiens
agacagaaagtgattgtctg

SEQ ID NO: 899 - DNA, 20 bp, Homo sapiens
ctgtccagaaaaggcaagac

SEQ ID NO: 900 - DNA, 20 bp, Homo sapiens
ctctccagtcttgccttttc

SEQ ID NO: 901 - DNA, 20 bp, Homo sapiens
tcataggaactgtccagaaa

SEQ ID NO: 902 - DNA, 20 bp, Homo sapiens
ttctggacagttcctatgaa

SEQ ID NO: 903 - DNA, 20 bp, Homo sapiens
taacacaggactccattcat

SEQ ID NO: 904 - DNA, 20 bp, Homo sapiens
tgcaaaagaccatgtaacac

SEQ ID NO: 905 - DNA, 20 bp, Homo sapiens
gaatggagtcctgtgttaca

SEQ ID NO: 906 - DNA, 20 bp, Homo sapiens
ggaatcattattctaagtga

SEQ ID NO: 907 - DNA, 20 bp, Homo sapiens
actacaacatacatgaatct

SEQ ID NO: 908 - DNA, 20 bp, Homo sapiens
tggattattcagtaataaaa

SEQ ID NO: 909 - DNA, 20 bp, Homo sapiens
aatgtggtctatctgtacaa

SEQ ID NO: 910 - DNA, 20 bp, Homo sapiens
atgaatggataaacaaaatg

SEQ ID NO: 911 - DNA, 20 bp, Homo sapiens
aatgtccttcagctgatgaa

SEQ ID NO: 912 - DNA, 20 bp, Homo sapiens
tttatccattcatcagctga

SEQ ID NO: 913 - DNA, 20 bp, Homo sapiens
tcatcagctgaaggacattt

SEQ ID NO: 914 - DNA, 20 bp, Homo sapiens
gaacatgttttcatttctct

SEQ ID NO: 915 - DNA, 20 bp, Homo sapiens
aacatgttttcatttctctt

SEQ ID NO: 916 - DNA, 20 bp, Homo sapiens
cttgggttgatacccagcag

SEQ ID NO: 917 - DNA, 20 bp, Homo sapiens
gacccagcaattcctctgct

SEQ ID NO: 918 - DNA, 20 bp, Homo sapiens
tgacccagcaattcctctgc

SEQ ID NO: 919 - DNA, 20 bp, Homo sapiens
atacccagcagaggaattgc

SEQ ID NO: 920 - DNA, 20 bp, Homo sapiens
tacccagcagaggaattgct

SEQ ID NO: 921 - DNA, 20 bp, Homo sapiens
gtaaaatggggcagtcactt

SEQ ID NO: 922 - DNA, 20 bp, Homo sapiens
gctgatgggaatgtaaaatg

SEQ ID NO: 923 - DNA, 20 bp, Homo sapiens
tgctgatgggaatgtaaaat

SEQ ID NO: 924 - DNA, 20 bp, Homo sapiens
ctgctgatgggaatgtaaaa

SEQ ID NO: 925 - DNA, 20 bp, Homo sapiens
aaccgttatacactgctgat

SEQ ID NO: 926 - DNA, 20 bp, Homo sapiens
gaaccgttatacactgctga

SEQ ID NO: 927 - DNA, 20 bp, Homo sapiens
ttcccatcagcagtgtataa

SEQ ID NO: 928 - DNA, 20 bp, Homo sapiens
cttgtctcaagaaaagaaaa

SEQ ID NO: 929 - DNA, 20 bp, Homo sapiens
ctttttcttttcttgagaca

SEQ ID NO: 930 - DNA, 20 bp, Homo sapiens
aaggttttgctctgtcaccc

SEQ ID NO: 931 - DNA, 20 bp, Homo sapiens
ttttgctctgtcacccaggc

SEQ ID NO: 932 - DNA, 20 bp, Homo sapiens
atgccactgcactccagcct

SEQ ID NO: 933 - DNA, 20 bp, Homo sapiens
catgccactgcactccagcc

SEQ ID NO: 934 - DNA, 20 bp, Homo sapiens
tcacccaggctggagtgcag

SEQ ID NO: 935 - DNA, 20 bp, Homo sapiens
ggagtgcagtggcatgatct

SEQ ID NO: 936 - DNA, 20 bp, Homo sapiens
caattgagcccaagagattg

SEQ ID NO: 937 - DNA, 20 bp, Homo sapiens
tcactgcagcctcaatctct

SEQ ID NO: 938 - DNA, 20 bp, Homo sapiens
cactgcagcctcaatctctt

SEQ ID NO: 939 - DNA, 20 bp, Homo sapiens
ctcaatctcttgggctcaat

SEQ ID NO: 940 - DNA, 20 bp, Homo sapiens
actcaggaggctgaggtggg

SEQ ID NO: 941 - DNA, 20 bp, Homo sapiens
gctactcaggaggctgaggt

SEQ ID NO: 942 - DNA, 20 bp, Homo sapiens
agctactcaggaggctgagg

SEQ ID NO: 943 - DNA, 20 bp, Homo sapiens
cccagctactcaggaggctg

SEQ ID NO: 944 - DNA, 20 bp, Homo sapiens
tgtagtcccagctactcagg

SEQ ID NO: 945 - DNA, 20 bp, Homo sapiens
acctgtagtcccagctactc

SEQ ID NO: 946 - DNA, 20 bp, Homo sapiens
acctcagcctcctgagtagc

SEQ ID NO: 947 - DNA, 20 bp, Homo sapiens
cctcagcctcctgagtagct

SEQ ID NO: 948 - DNA, 20 bp, Homo sapiens
tcctgagtagctgggactac

SEQ ID NO: 949 - DNA, 20 bp, Homo sapiens
caaaaattagctggatgtgg

SEQ ID NO: 950 - DNA, 20 bp, Homo sapiens
atacaaaaattagctggatg

SEQ ID NO: 951 - DNA, 20 bp, Homo sapiens
ccaaaaatacaaaaattagc

SEQ ID NO: 952 - DNA, 20 bp, Homo sapiens
ccagctaatttttgtatttt

SEQ ID NO: 953 - DNA, 20 bp, Homo sapiens
ttttgtatttttggtagaga

SEQ ID NO: 954 - DNA, 20 bp, Homo sapiens
tttgtatttttggtagagat

SEQ ID NO: 955 - DNA, 20 bp, Homo sapiens
ttgtatttttggtagagatg

SEQ ID NO: 956 - DNA, 20 bp, Homo sapiens
tgagaacagcctgggcaaca

SEQ ID NO: 957 - DNA, 20 bp, Homo sapiens
ggggttttgccatgttgccc

SEQ ID NO: 958 - DNA, 20 bp, Homo sapiens
caggagtttgagaacagcct

SEQ ID NO: 959 - DNA, 20 bp, Homo sapiens
ccaggagtttgagaacagcc

SEQ ID NO: 960 - DNA, 20 bp, Homo sapiens
ccaggctgttctcaaactcc

SEQ ID NO: 961 - DNA, 20 bp, Homo sapiens
caggctgttctcaaactcct

SEQ ID NO: 962 - DNA, 20 bp, Homo sapiens
tgggcagatcacttgagccc

SEQ ID NO: 963 - DNA, 20 bp, Homo sapiens
ctcaagtgatctgcccacct

SEQ ID NO: 964 - DNA, 20 bp, Homo sapiens
ggacttggggaggccgaggt

SEQ ID NO: 965 - DNA, 20 bp, Homo sapiens
aggacttggggaggccgagg

SEQ ID NO: 966 - DNA, 20 bp, Homo sapiens
cccaggacttggggaggccg

SEQ ID NO: 967 - DNA, 20 bp, Homo sapiens
tataatcccaggacttgggg

SEQ ID NO: 968 - DNA, 20 bp, Homo sapiens
acctataatcccaggacttg

SEQ ID NO: 969 - DNA, 20 bp, Homo sapiens
acctcggcctccccaagtcc

SEQ ID NO: 970 - DNA, 20 bp, Homo sapiens
cacctataatcccaggactt

SEQ ID NO: 971 - DNA, 20 bp, Homo sapiens
cctcggcctccccaagtcct

SEQ ID NO: 972 - DNA, 20 bp, Homo sapiens
acacctataatcccaggact

SEQ ID NO: 973 - DNA, 20 bp, Homo sapiens
cggctcacacctataatccc

SEQ ID NO: 974 - DNA, 20 bp, Homo sapiens
tccccaagtcctgggattat

SEQ ID NO: 975 - DNA, 20 bp, Homo sapiens
gaaccctcagccaggcgcag

SEQ ID NO: 976 - DNA, 20 bp, Homo sapiens
taggtgtgagccgctgcgcc

SEQ ID NO: 977 - DNA, 20 bp, Homo sapiens
tgagccgctgcgcctggctg

SEQ ID NO: 978 - DNA, 20 bp, Homo sapiens
gagccgctgcgcctggctga

SEQ ID NO: 979 - DNA, 20 bp, Homo sapiens
agacagtggaaccctcagcc

SEQ ID NO: 980 - DNA, 20 bp, Homo sapiens
tgctgcagacgtacagacag

SEQ ID NO: 981 - DNA, 20 bp, Homo sapiens
agcaatacataccattcttg

SEQ ID NO: 982 - DNA, 20 bp, Homo sapiens
ccaccttttacccacaagaa

SEQ ID NO: 983 - DNA, 20 bp, Homo sapiens
gcaatacataccattcttgt

SEQ ID NO: 984 - DNA, 20 bp, Homo sapiens
ataccattcttgtgggtaaa

SEQ ID NO: 985 - DNA, 20 bp, Homo sapiens
ccattcttgtgggtaaaagg

SEQ ID NO: 986 - DNA, 20 bp, Homo sapiens
ttttgatttgcatttcccca

SEQ ID NO: 987 - DNA, 20 bp, Homo sapiens
cttgccatcatttgaccttg

SEQ ID NO: 988 - DNA, 20 bp, Homo sapiens
acttgccatcatttgacctt

SEQ ID NO: 989 - DNA, 20 bp, Homo sapiens
cacttgccatcatttgacct

SEQ ID NO: 990 - DNA, 20 bp, Homo sapiens
atttccccaaggtcaaatga

SEQ ID NO: 991 - DNA, 20 bp, Homo sapiens
caaggtcaaatgatggcaag

SEQ ID NO: 992 - DNA, 20 bp, Homo sapiens
tcaccaaaaacatatacaaa

SEQ ID NO: 993 - DNA, 20 bp, Homo sapiens
tagccatttgtatatgtttt

SEQ ID NO: 994 - DNA, 20 bp, Homo sapiens
aaaaggcaaaacatttcaat

SEQ ID NO: 995 - DNA, 20 bp, Homo sapiens
agacaactcaatttttaaaa

SEQ ID NO: 996 - DNA, 20 bp, Homo sapiens
gaactctcaaaactgaacaa

SEQ ID NO: 997 - DNA, 20 bp, Homo sapiens
atatttgcaaatcatatatc

SEQ ID NO: 998 - DNA, 20 bp, Homo sapiens
aaaaagtgttaaactattga

SEQ ID NO: 999 - DNA, 20 bp, Homo sapiens
atagtttaacacttttttat

SEQ ID NO: 1000 - DNA, 20 bp, Homo sapiens
aaaaagttaataaattggaa

SEQ ID NO: 1001 - DNA, 20 bp, Homo sapiens
aaaagaaaaagttaataaat

SEQ ID NO: 1002 - DNA, 20 bp, Homo sapiens
tttttcttttattgtgtatc

SEQ ID NO: 1003 - DNA, 20 bp, Homo sapiens
agattaaatctttgtgacac

SEQ ID NO: 1004 - DNA, 20 bp, Homo sapiens
cttacacataaactagaaag

SEQ ID NO: 1005 - DNA, 20 bp, Homo sapiens
attatgcaacttaggtaaaa

SEQ ID NO: 1006 - DNA, 20 bp, Homo sapiens
gccaacaaattatgcaactt

SEQ ID NO: 1007 - DNA, 20 bp, Homo sapiens
acctaagttgcataatttgt

SEQ ID NO: 1008 - DNA, 20 bp, Homo sapiens
cagagattaaaaggatttca

SEQ ID NO: 1009 - DNA, 20 bp, Homo sapiens
ccaatcttacagagattaaa

SEQ ID NO: 1010 - DNA, 20 bp, Homo sapiens
ccttttaatctctgtaagat

SEQ ID NO: 1011 - DNA, 20 bp, Homo sapiens
actaaaatcaggactaaaag

SEQ ID NO: 1012 - DNA, 20 bp, Homo sapiens
gaacacaaataactaaaatc

SEQ ID NO: 1013 - DNA, 20 bp, Homo sapiens
atttgtgttctctctctctc

SEQ ID NO: 1014 - DNA, 20 bp, Homo sapiens
taaagtaaaaaaatatcaaa

SEQ ID NO: 1015 - DNA, 20 bp, Homo sapiens
ctttctgttctctagttcat

SEQ ID NO: 1016 - DNA, 20 bp, Homo sapiens
taaacccaaagtgagaagag

SEQ ID NO: 1017 - DNA, 20 bp, Homo sapiens
ggtttccactcttctcactt

SEQ ID NO: 1018 - DNA, 20 bp, Homo sapiens
gtttccactcttctcacttt

SEQ ID NO: 1019 - DNA, 20 bp, Homo sapiens
cttattgtagttacttacaa

SEQ ID NO: 1020 - DNA, 20 bp, Homo sapiens
taactaaagctgtgtttcaa

SEQ ID NO: 1021 - DNA, 20 bp, Homo sapiens
ataactaaagctgtgtttca

SEQ ID NO: 1022 - DNA, 20 bp, Homo sapiens
tagttatatctcataaattt

SEQ ID NO: 1023 - DNA, 20 bp, Homo sapiens
cataattctaaataagcaat

SEQ ID NO: 1024 - DNA, 20 bp, Homo sapiens
acataattctaaataagcaa

SEQ ID NO: 1025 - DNA, 20 bp, Homo sapiens
tttaatttctatgtatttat

SEQ ID NO: 1026 - DNA, 20 bp, Homo sapiens
gaaattaacaaaagaaattt

SEQ ID NO: 1027 - DNA, 20 bp, Homo sapiens
agaaattaacaaaagaaatt

SEQ ID NO: 1028 - DNA, 20 bp, Homo sapiens
tttctgatttcattcccctg

SEQ ID NO: 1029 - DNA, 20 bp, Homo sapiens
agtttcttctctagccacag

SEQ ID NO: 1030 - DNA, 20 bp, Homo sapiens
gagtttcttctctagccaca

SEQ ID NO: 1031 - DNA, 20 bp, Homo sapiens
agagtttcttctctagccac

SEQ ID NO: 1032 - DNA, 20 bp, Homo sapiens
tggctagagaagaaactctg

SEQ ID NO: 1033 - DNA, 20 bp, Homo sapiens
acaattctgagaaattcgaa

SEQ ID NO: 1034 - DNA, 20 bp, Homo sapiens
aatttctcagaattgtttta

SEQ ID NO: 1035 - DNA, 20 bp, Homo sapiens
tgcacatggaacagtgtcca

SEQ ID NO: 1036 - DNA, 20 bp, Homo sapiens
acgttctcctcaagtgcaca

SEQ ID NO: 1037 - DNA, 20 bp, Homo sapiens
cactgttccatgtgcacttg

SEQ ID NO: 1038 - DNA, 20 bp, Homo sapiens
acttgaggagaacgtgactt

SEQ ID NO: 1039 - DNA, 20 bp, Homo sapiens
acgtgacttcggctcttgcc

SEQ ID NO: 1040 - DNA, 20 bp, Homo sapiens
tgacttcggctcttgccagg

SEQ ID NO: 1041 - DNA, 20 bp, Homo sapiens
catctctagaacactccacc

SEQ ID NO: 1042 - DNA, 20 bp, Homo sapiens
agtgttctagagatgtcagt

SEQ ID NO: 1043 - DNA, 20 bp, Homo sapiens
tacaaatgacttgacatcac

SEQ ID NO: 1044 - DNA, 20 bp, Homo sapiens
tcctaccccactctcagtaa

SEQ ID NO: 1045 - DNA, 20 bp, Homo sapiens
attctatccattactgagag

SEQ ID NO: 1046 - DNA, 20 bp, Homo sapiens
ttctatccattactgagagt

SEQ ID NO: 1047 - DNA, 20 bp, Homo sapiens
tctatccattactgagagtg

SEQ ID NO: 1048 - DNA, 20 bp, Homo sapiens
tccattactgagagtggggt

SEQ ID NO: 1049 - DNA, 20 bp, Homo sapiens
ctgagagtggggtaggattt

SEQ ID NO: 1050 - DNA, 20 bp, Homo sapiens
aaaaacaaaaaaacaataat

SEQ ID NO: 1051 - DNA, 20 bp, Homo sapiens
gtttttttttttttttgagg

SEQ ID NO: 1052 - DNA, 20 bp, Homo sapiens
ggagtctcactttgtcaccc

SEQ ID NO: 1053 - DNA, 20 bp, Homo sapiens
tctcactttgtcacccaggc

SEQ ID NO: 1054 - DNA, 20 bp, Homo sapiens
ataccactgcactccagcct

SEQ ID NO: 1055 - DNA, 20 bp, Homo sapiens
cataccactgcactccagcc

SEQ ID NO: 1056 - DNA, 20 bp, Homo sapiens
tcacccaggctggagtgcag

SEQ ID NO: 1057 - DNA, 20 bp, Homo sapiens
acctaagccttgggaggtgg

SEQ ID NO: 1058 - DNA, 20 bp, Homo sapiens
gacctaagccttgggaggtg

SEQ ID NO: 1059 - DNA, 20 bp, Homo sapiens
tgacctaagccttgggaggt

SEQ ID NO: 1060 - DNA, 20 bp, Homo sapiens
gtgacctaagccttgggagg

SEQ ID NO: 1061 - DNA, 20 bp, Homo sapiens
actgcagcccccacctccca

SEQ ID NO: 1062 - DNA, 20 bp, Homo sapiens
gaggtgacctaagccttggg

SEQ ID NO: 1063 - DNA, 20 bp, Homo sapiens
gctgaggtgacctaagcctt

SEQ ID NO: 1064 - DNA, 20 bp, Homo sapiens
gcccccacctcccaaggctt

SEQ ID NO: 1065 - DNA, 20 bp, Homo sapiens
ggctgaggtgacctaagcct

SEQ ID NO: 1066 - DNA, 20 bp, Homo sapiens
tgcagctactcaggaggctg

SEQ ID NO: 1067 - DNA, 20 bp, Homo sapiens
tgtagttgcagctactcagg

SEQ ID NO: 1068 - DNA, 20 bp, Homo sapiens
gcctgtagttgcagctactc

SEQ ID NO: 1069 - DNA, 20 bp, Homo sapiens
tcctgagtagctgcaactac

SEQ ID NO: 1070 - DNA, 20 bp, Homo sapiens
caaaaatcagctaggcatga

SEQ ID NO: 1071 - DNA, 20 bp, Homo sapiens
aaaaaatgcaaaaatcagct

SEQ ID NO: 1072 - DNA, 20 bp, Homo sapiens
tttttgcattttttatagac

SEQ ID NO: 1073 - DNA, 20 bp, Homo sapiens
ttttgcattttttatagaca

SEQ ID NO: 1074 - DNA, 20 bp, Homo sapiens
cgtgaccagcctaagtaaca

SEQ ID NO: 1075 - DNA, 20 bp, Homo sapiens
agggttttgccatgttactt

SEQ ID NO: 1076 - DNA, 20 bp, Homo sapiens
ttttgccatgttacttaggc

SEQ ID NO: 1077 - DNA, 20 bp, Homo sapiens
ttaggctggtcacgaactcc

SEQ ID NO: 1078 - DNA, 20 bp, Homo sapiens
taggctggtcacgaactcct

SEQ ID NO: 1079 - DNA, 20 bp, Homo sapiens
tgggtgggtcacttgagccc

SEQ ID NO: 1080 - DNA, 20 bp, Homo sapiens
tttgggaggccgaggtgggt

SEQ ID NO: 1081 - DNA, 20 bp, Homo sapiens
ctttgggaggccgaggtggg

SEQ ID NO: 1082 - DNA, 20 bp, Homo sapiens
ctcaagtgacccacccacct

SEQ ID NO: 1083 - DNA, 20 bp, Homo sapiens
gcactttgggaggccgaggt

SEQ ID NO: 1084 - DNA, 20 bp, Homo sapiens
agcactttgggaggccgagg

SEQ ID NO: 1085 - DNA, 20 bp, Homo sapiens
cccagcactttgggaggccg

SEQ ID NO: 1086 - DNA, 20 bp, Homo sapiens
tgtaatcccagcactttggg

SEQ ID NO: 1087 - DNA, 20 bp, Homo sapiens
gcttgtaatcccagcacttt

SEQ ID NO: 1088 - DNA, 20 bp, Homo sapiens
acctcggcctcccaaagtgc

SEQ ID NO: 1089 - DNA, 20 bp, Homo sapiens
cgcttgtaatcccagcactt

SEQ ID NO: 1090 - DNA, 20 bp, Homo sapiens
cctcggcctcccaaagtgct

SEQ ID NO: 1091 - DNA, 20 bp, Homo sapiens
caagcgtgagtcaccatgcc

SEQ ID NO: 1092 - DNA, 20 bp, Homo sapiens
agtaatggttgggccaggca

SEQ ID NO: 1093 - DNA, 20 bp, Homo sapiens
tcaccagtaatggttgggcc

SEQ ID NO: 1094 - DNA, 20 bp, Homo sapiens
tcaattcaccagtaatggtt

SEQ ID NO: 1095 - DNA, 20 bp, Homo sapiens
gtcaattcaccagtaatggt

SEQ ID NO: 1096 - DNA, 20 bp, Homo sapiens
atgcctggcccaaccattac

SEQ ID NO: 1097 - DNA, 20 bp, Homo sapiens
aacagtcaattcaccagtaa

SEQ ID NO: 1098 - DNA, 20 bp, Homo sapiens
caaaaactcacagaattgaa

SEQ ID NO: 1099 - DNA, 20 bp, Homo sapiens
gcaaaaactcacagaattga

SEQ ID NO: 1100 - DNA, 20 bp, Homo sapiens
ttttgcttcatgtattgctg

SEQ ID NO: 1101 - DNA, 20 bp, Homo sapiens
tttgcttcatgtattgctgc

SEQ ID NO: 1102 - DNA, 20 bp, Homo sapiens
gtattgctgcgggataatta

SEQ ID NO: 1103 - DNA, 20 bp, Homo sapiens
taaggaatcagagagaccga

SEQ ID NO: 1104 - DNA, 20 bp, Homo sapiens
aaggaatcagagagaccgat

SEQ ID NO: 1105 - DNA, 20 bp, Homo sapiens
aggaatcagagagaccgatg

SEQ ID NO: 1106 - DNA, 20 bp, Homo sapiens
taattcctcctcaaccccat

SEQ ID NO: 1107 - DNA, 20 bp, Homo sapiens
cagagagaccgatggggttg

SEQ ID NO: 1108 - DNA, 20 bp, Homo sapiens
agagaccgatggggttgagg

SEQ ID NO: 1109 - DNA, 20 bp, Homo sapiens
gaggaattatttaattattt

SEQ ID NO: 1110 - DNA, 20 bp, Homo sapiens
ggatgttaatctgattgggt

SEQ ID NO: 1111 - DNA, 20 bp, Homo sapiens
ctttggatgttaatctgatt

SEQ ID NO: 1112 - DNA, 20 bp, Homo sapiens
cctttggatgttaatctgat

SEQ ID NO: 1113 - DNA, 20 bp, Homo sapiens
ccaatcagattaacatccaa

SEQ ID NO: 1114 - DNA, 20 bp, Homo sapiens
cagattaacatccaaaggac

SEQ ID NO: 1115 - DNA, 20 bp, Homo sapiens
ttgtttggggcccagtcctt

SEQ ID NO: 1116 - DNA, 20 bp, Homo sapiens
agattaacatccaaaggact

SEQ ID NO: 1117 - DNA, 20 bp, Homo sapiens
gtagcttgactctttgtttg

SEQ ID NO: 1118 - DNA, 20 bp, Homo sapiens
ggtagcttgactctttgttt

SEQ ID NO: 1119 - DNA, 20 bp, Homo sapiens
aggtagcttgactctttgtt

SEQ ID NO: 1120 - DNA, 20 bp, Homo sapiens
caccccacaaaatgcttaaa

SEQ ID NO: 1121 - DNA, 20 bp, Homo sapiens
gctaccttttaagcattttg

SEQ ID NO: 1122 - DNA, 20 bp, Homo sapiens
ctaccttttaagcattttgt

SEQ ID NO: 1123 - DNA, 20 bp, Homo sapiens
taccttttaagcattttgtg

SEQ ID NO: 1124 - DNA, 20 bp, Homo sapiens
cttttaagcattttgtgggg

SEQ ID NO: 1125 - DNA, 20 bp, Homo sapiens
ttttaagcattttgtggggt

SEQ ID NO: 1126 - DNA, 20 bp, Homo sapiens
tttaagcattttgtggggtg

SEQ ID NO: 1127 - DNA, 20 bp, Homo sapiens
ttaagcattttgtggggtgg

SEQ ID NO: 1128 - DNA, 20 bp, Homo sapiens
taagcattttgtggggtggg

SEQ ID NO: 1129 - DNA, 20 bp, Homo sapiens
gggtggggggagatttgtgc

SEQ ID NO: 1130 - DNA, 20 bp, Homo sapiens
ggtggggggagatttgtgca

SEQ ID NO: 1131 - DNA, 20 bp, Homo sapiens
gtggggggagatttgtgcag

SEQ ID NO: 1132 - DNA, 20 bp, Homo sapiens
tggggggagatttgtgcagg

SEQ ID NO: 1133 - DNA, 20 bp, Homo sapiens
acattatttcttacttttca

SEQ ID NO: 1134 - DNA, 20 bp, Homo sapiens
tctctagctgtgcagctgca

SEQ ID NO: 1135 - DNA, 20 bp, Homo sapiens
aacagagtcttcgcaatgcc

SEQ ID NO: 1136 - DNA, 20 bp, Homo sapiens
acagagtcttcgcaatgcct

SEQ ID NO: 1137 - DNA, 20 bp, Homo sapiens
gtcttcgcaatgcctgggaa

SEQ ID NO: 1138 - DNA, 20 bp, Homo sapiens
tcttcgcaatgcctgggaaa

SEQ ID NO: 1139 - DNA, 20 bp, Homo sapiens
gccttatctctccctttccc

SEQ ID NO: 1140 - DNA, 20 bp, Homo sapiens
gcctgggaaagggagagata

SEQ ID NO: 1141 - DNA, 20 bp, Homo sapiens
attaactggctgtttttctg

SEQ ID NO: 1142 - DNA, 20 bp, Homo sapiens
ggagtcctttaaaaattaac

SEQ ID NO: 1143 - DNA, 20 bp, Homo sapiens
aacagccagttaatttttaa

SEQ ID NO: 1144 - DNA, 20 bp, Homo sapiens
ccttgaggaagagaaagggc

SEQ ID NO: 1145 - DNA, 20 bp, Homo sapiens
ttccccttgaggaagagaaa

SEQ ID NO: 1146 - DNA, 20 bp, Homo sapiens
attccccttgaggaagagaa

SEQ ID NO: 1147 - DNA, 20 bp, Homo sapiens
ccagccctttctcttcctca

SEQ ID NO: 1148 - DNA, 20 bp, Homo sapiens
cagccctttctcttcctcaa

SEQ ID NO: 1149 - DNA, 20 bp, Homo sapiens
agccctttctcttcctcaag

SEQ ID NO: 1150 - DNA, 20 bp, Homo sapiens
taaaaaaccaattccccttg

SEQ ID NO: 1151 - DNA, 20 bp, Homo sapiens
ttctcttcctcaaggggaat

SEQ ID NO: 1152 - DNA, 20 bp, Homo sapiens
tagccccaaaatactagaac

SEQ ID NO: 1153 - DNA, 20 bp, Homo sapiens
taattcctgttctagtattt

SEQ ID NO: 1154 - DNA, 20 bp, Homo sapiens
aattcctgttctagtatttt

SEQ ID NO: 1155 - DNA, 20 bp, Homo sapiens
attcctgttctagtattttg

SEQ ID NO: 1156 - DNA, 20 bp, Homo sapiens
tgttctagtattttggggct

SEQ ID NO: 1157 - DNA, 20 bp, Homo sapiens
tattttggggctaggttgtc

SEQ ID NO: 1158 - DNA, 20 bp, Homo sapiens
gatgtattcactttatatca

SEQ ID NO: 1159 - DNA, 20 bp, Homo sapiens
atttttgatcttaaaaaagt

SEQ ID NO: 1160 - DNA, 20 bp, Homo sapiens
tcttaaaaaagttggccaga

SEQ ID NO: 1161 - DNA, 20 bp, Homo sapiens
cttaaaaaagttggccagat

SEQ ID NO: 1162 - DNA, 20 bp, Homo sapiens
ttaaaaaagttggccagatg

SEQ ID NO: 1163 - DNA, 20 bp, Homo sapiens
caggcatgagccaccccatc

SEQ ID NO: 1164 - DNA, 20 bp, Homo sapiens
aaaaagttggccagatgggg

SEQ ID NO: 1165 - DNA, 20 bp, Homo sapiens
tcccaaagtgctgggatcac

SEQ ID NO: 1166 - DNA, 20 bp, Homo sapiens
ccttggcctcccaaagtgct

SEQ ID NO: 1167 - DNA, 20 bp, Homo sapiens
tgcctgtgatcccagcactt

SEQ ID NO: 1168 - DNA, 20 bp, Homo sapiens
gccttggcctcccaaagtgc

SEQ ID NO: 1169 - DNA, 20 bp, Homo sapiens
gcctgtgatcccagcacttt

SEQ ID NO: 1170 - DNA, 20 bp, Homo sapiens
tgtgatcccagcactttggg

SEQ ID NO: 1171 - DNA, 20 bp, Homo sapiens
cccagcactttgggaggcca

SEQ ID NO: 1172 - DNA, 20 bp, Homo sapiens
gcactttgggaggccaaggc

SEQ ID NO: 1173 - DNA, 20 bp, Homo sapiens
ctcaggtgatccacctgcct

SEQ ID NO: 1174 - DNA, 20 bp, Homo sapiens
ctttgggaggccaaggcagg

SEQ ID NO: 1175 - DNA, 20 bp, Homo sapiens
caaggcaggtggatcacctg

SEQ ID NO: 1176 - DNA, 20 bp, Homo sapiens
caggtggatcacctgaggtc

SEQ ID NO: 1177 - DNA, 20 bp, Homo sapiens
agtcttgaactcctgacctc

SEQ ID NO: 1178 - DNA, 20 bp, Homo sapiens
tcaggagttcaagactagcc

SEQ ID NO: 1179 - DNA, 20 bp, Homo sapiens
ggggtttcaccatgttcgcc

SEQ ID NO: 1180 - DNA, 20 bp, Homo sapiens
caagactagcctggcgaaca

SEQ ID NO: 1181 - DNA, 20 bp, Homo sapiens
ttgtattttcagtagagacg

SEQ ID NO: 1182 - DNA, 20 bp, Homo sapiens
tttgtattttcagtagagac

SEQ ID NO: 1183 - DNA, 20 bp, Homo sapiens
ttttgtattttcagtagaga

SEQ ID NO: 1184 - DNA, 20 bp, Homo sapiens
caggcgcacaccatcacagc

SEQ ID NO: 1185 - DNA, 20 bp, Homo sapiens
aaaaaattagccagctgtga

SEQ ID NO: 1186 - DNA, 20 bp, Homo sapiens
tcccaagtagcagggattac

SEQ ID NO: 1187 - DNA, 20 bp, Homo sapiens
cctcagcctcccaagtagca

SEQ ID NO: 1188 - DNA, 20 bp, Homo sapiens
cgcctgtaatccctgctact

SEQ ID NO: 1189 - DNA, 20 bp, Homo sapiens
gcctcagcctcccaagtagc

SEQ ID NO: 1190 - DNA, 20 bp, Homo sapiens
gcctgtaatccctgctactt

SEQ ID NO: 1191 - DNA, 20 bp, Homo sapiens
tgtaatccctgctacttggg

SEQ ID NO: 1192 - DNA, 20 bp, Homo sapiens
ccctgctacttgggaggctg

SEQ ID NO: 1193 - DNA, 20 bp, Homo sapiens
gcacgagaattgcttgaacc

SEQ ID NO: 1194 - DNA, 20 bp, Homo sapiens
cacgagaattgcttgaaccc

SEQ ID NO: 1195 - DNA, 20 bp, Homo sapiens
gagaattgcttgaacccggg

SEQ ID NO: 1196 - DNA, 20 bp, Homo sapiens
gactgtaacctcagcctccc

SEQ ID NO: 1197 - DNA, 20 bp, Homo sapiens
tgactgtaacctcagcctcc

SEQ ID NO: 1198 - DNA, 20 bp, Homo sapiens
tgcttgaacccgggaggctg

SEQ ID NO: 1199 - DNA, 20 bp, Homo sapiens
ggagtgcagtggcacgatct

SEQ ID NO: 1200 - DNA, 20 bp, Homo sapiens
tcacccaggttggagtgcag

SEQ ID NO: 1201 - DNA, 20 bp, Homo sapiens
cgtgccactgcactccaacc

SEQ ID NO: 1202 - DNA, 20 bp, Homo sapiens
gtgccactgcactccaacct

SEQ ID NO: 1203 - DNA, 20 bp, Homo sapiens
tctcactctatcacccaggt

SEQ ID NO: 1204 - DNA, 20 bp, Homo sapiens
agagtctcactctatcaccc

SEQ ID NO: 1205 - DNA, 20 bp, Homo sapiens
aacaaccgtaagggagcttg

SEQ ID NO: 1206 - DNA, 20 bp, Homo sapiens
tttctcctcaagctccctta

SEQ ID NO: 1207 - DNA, 20 bp, Homo sapiens
tgctatgcaaacaaccgtaa

SEQ ID NO: 1208 - DNA, 20 bp, Homo sapiens
ttgctatgcaaacaaccgta

SEQ ID NO: 1209 - DNA, 20 bp, Homo sapiens
tacaaataggtcaaagcaaa

SEQ ID NO: 1210 - DNA, 20 bp, Homo sapiens
ttagaaacaaagatacaaat

SEQ ID NO: 1211 - DNA, 20 bp, Homo sapiens
aaagtatgtatgtctctcac

SEQ ID NO: 1212 - DNA, 20 bp, Homo sapiens
aaaggcagagatcgttagac

SEQ ID NO: 1213 - DNA, 20 bp, Homo sapiens
aacgatctctgccttttgat

SEQ ID NO: 1214 - DNA, 20 bp, Homo sapiens
gaatgaacatgccaatcaaa

SEQ ID NO: 1215 - DNA, 20 bp, Homo sapiens
cagcaataataacattgaat

SEQ ID NO: 1216 - DNA, 20 bp, Homo sapiens
acagcaataataacattgaa

SEQ ID NO: 1217 - DNA, 20 bp, Homo sapiens
attcaatgttattattgctg

SEQ ID NO: 1218 - DNA, 20 bp, Homo sapiens
aatgttattattgctgtggt

SEQ ID NO: 1219 - DNA, 20 bp, Homo sapiens
acaaattgtgaactgataga

SEQ ID NO: 1220 - DNA, 20 bp, Homo sapiens
agatgaacagaagaacaaaa

SEQ ID NO: 1221 - DNA, 20 bp, Homo sapiens
aaaatacttaatacaaaaga

SEQ ID NO: 1222 - DNA, 20 bp, Homo sapiens
tatacacttaaaaagaaaaa

SEQ ID NO: 1223 - DNA, 20 bp, Homo sapiens
atatacacttaaaaagaaaa

SEQ ID NO: 1224 - DNA, 20 bp, Homo sapiens
attttgttagtgtttgctcc

SEQ ID NO: 1225 - DNA, 20 bp, Homo sapiens
ttttgttagtgtttgctcca

SEQ ID NO: 1226 - DNA, 20 bp, Homo sapiens
aaaatgcatattgtaatccc

SEQ ID NO: 1227 - DNA, 20 bp, Homo sapiens
aatatgcattttaatttatc

SEQ ID NO: 1228 - DNA, 20 bp, Homo sapiens
tactaattttagtaaaatac

SEQ ID NO: 1229 - DNA, 20 bp, Homo sapiens
gggaggaaatggagttatac

SEQ ID NO: 1230 - DNA, 20 bp, Homo sapiens
acaagcaaggagggaggaaa

SEQ ID NO: 1231 - DNA, 20 bp, Homo sapiens
caaaccacaagcaaggaggg

SEQ ID NO: 1232 - DNA, 20 bp, Homo sapiens
ctacaaaccacaagcaagga

SEQ ID NO: 1233 - DNA, 20 bp, Homo sapiens
actacaaaccacaagcaagg

SEQ ID NO: 1234 - DNA, 20 bp, Homo sapiens
atttcctccctccttgcttg

SEQ ID NO: 1235 - DNA, 20 bp, Homo sapiens
aatactacaaaccacaagca

SEQ ID NO: 1236 - DNA, 20 bp, Homo sapiens
atgttataaactcaacaaca

SEQ ID NO: 1237 - DNA, 20 bp, Homo sapiens
tcaattcagtaagacaagta

SEQ ID NO: 1238 - DNA, 20 bp, Homo sapiens
agacaatagcttgaatatac

SEQ ID NO: 1239 - DNA, 20 bp, Homo sapiens
tgtatattcaagctattgtc

SEQ ID NO: 1240 - DNA, 20 bp, Homo sapiens
atatatactggagcaaggaa

SEQ ID NO: 1241 - DNA, 20 bp, Homo sapiens
ttattatatatactggagca

SEQ ID NO: 1242 - DNA, 20 bp, Homo sapiens
aatgaagttattatatatac

SEQ ID NO: 1243 - DNA, 20 bp, Homo sapiens
aatagcataaaggagcaagg

SEQ ID NO: 1244 - DNA, 20 bp, Homo sapiens
aataatagcataaaggagca

SEQ ID NO: 1245 - DNA, 20 bp, Homo sapiens
atatgacaataatagcataa

SEQ ID NO: 1246 - DNA, 20 bp, Homo sapiens
gctaagctgacttagctgat

SEQ ID NO: 1247 - DNA, 20 bp, Homo sapiens
tgctaagctgacttagctga

SEQ ID NO: 1248 - DNA, 20 bp, Homo sapiens
tcagctaagtcagcttagca

SEQ ID NO: 1249 - DNA, 20 bp, Homo sapiens
acaaagtcaatgaataaatc

SEQ ID NO: 1250 - DNA, 20 bp, Homo sapiens
agtcaatgaataaatcaggc

SEQ ID NO: 1251 - DNA, 20 bp, Homo sapiens
gtcaatgaataaatcaggct

SEQ ID NO: 1252 - DNA, 20 bp, Homo sapiens
tgaataaatcaggctgggtg

SEQ ID NO: 1253 - DNA, 20 bp, Homo sapiens
ataaatcaggctgggtgtgg

SEQ ID NO: 1254 - DNA, 20 bp, Homo sapiens
tcccaaagtgctgggattgc

SEQ ID NO: 1255 - DNA, 20 bp, Homo sapiens
tcttggcctcccaaagtgct

SEQ ID NO: 1256 - DNA, 20 bp, Homo sapiens
cacctgcaatcccagcactt

SEQ ID NO: 1257 - DNA, 20 bp, Homo sapiens
atcttggcctcccaaagtgc

SEQ ID NO: 1258 - DNA, 20 bp, Homo sapiens
acctgcaatcccagcacttt

SEQ ID NO: 1259 - DNA, 20 bp, Homo sapiens
tgcaatcccagcactttggg

SEQ ID NO: 1260 - DNA, 20 bp, Homo sapiens
gcactttgggaggccaagat

SEQ ID NO: 1261 - DNA, 20 bp, Homo sapiens
ctcaagtgatctacctatct

SEQ ID NO: 1262 - DNA, 20 bp, Homo sapiens
caagataggtagatcacttg

SEQ ID NO: 1263 - DNA, 20 bp, Homo sapiens
taggtagatcacttgaggcc

SEQ ID NO: 1264 - DNA, 20 bp, Homo sapiens
ccaggctgctctcaaactcc

SEQ ID NO: 1265 - DNA, 20 bp, Homo sapiens
ccaggagtttgagagcagcc

SEQ ID NO: 1266 - DNA, 20 bp, Homo sapiens
ggagtcttgccatgtgggcc

SEQ ID NO: 1267 - DNA, 20 bp, Homo sapiens
tgagagcagcctggcccaca

SEQ ID NO: 1268 - DNA, 20 bp, Homo sapiens
aagatggagtcttgccatgt

SEQ ID NO: 1269 - DNA, 20 bp, Homo sapiens
aaagatggagtcttgccatg

SEQ ID NO: 1270 - DNA, 20 bp, Homo sapiens
tttttgtatttttgtaaaga

SEQ ID NO: 1271 - DNA, 20 bp, Homo sapiens
aaaaaaaaaaaagttgagtg

SEQ ID NO: 1272 - DNA, 20 bp, Homo sapiens
aaaaaaaaagttgagtgtgg

SEQ ID NO: 1273 - DNA, 20 bp, Homo sapiens
tcccaagtaggtgggattac

SEQ ID NO: 1274 - DNA, 20 bp, Homo sapiens
cctcagcctcccaagtaggt

SEQ ID NO: 1275 - DNA, 20 bp, Homo sapiens
cgcctgtaatcccacctact

SEQ ID NO: 1276 - DNA, 20 bp, Homo sapiens
gcctcagcctcccaagtagg

SEQ ID NO: 1277 - DNA, 20 bp, Homo sapiens
gcctgtaatcccacctactt

SEQ ID NO: 1278 - DNA, 20 bp, Homo sapiens
catgcctcagcctcccaagt

SEQ ID NO: 1279 - DNA, 20 bp, Homo sapiens
tgtaatcccacctacttggg

SEQ ID NO: 1280 - DNA, 20 bp, Homo sapiens
cccacctacttgggaggctg

SEQ ID NO: 1281 - DNA, 20 bp, Homo sapiens
catgagaattgcttgaaccc

SEQ ID NO: 1282 - DNA, 20 bp, Homo sapiens
gagaattgcttgaacccagg

SEQ ID NO: 1283 - DNA, 20 bp, Homo sapiens
agaattgcttgaacccagga

SEQ ID NO: 1284 - DNA, 20 bp, Homo sapiens
cactgcaacctctccctcct

SEQ ID NO: 1285 - DNA, 20 bp, Homo sapiens
tcactgcaacctctccctcc

SEQ ID NO: 1286 - DNA, 20 bp, Homo sapiens
tgcttgaacccaggagggag

SEQ ID NO: 1287 - DNA, 20 bp, Homo sapiens
gagggagaggttgcagtgac

SEQ ID NO: 1288 - DNA, 20 bp, Homo sapiens
ttgcccagtctggagtgcag

SEQ ID NO: 1289 - DNA, 20 bp, Homo sapiens
cacaccactgcactccagac

SEQ ID NO: 1290 - DNA, 20 bp, Homo sapiens
acaccactgcactccagact

SEQ ID NO: 1291 - DNA, 20 bp, Homo sapiens
tcttgccctgttgcccagtc

SEQ ID NO: 1292 - DNA, 20 bp, Homo sapiens
tgcactccagactgggcaac

SEQ ID NO: 1293 - DNA, 20 bp, Homo sapiens
gcactccagactgggcaaca

SEQ ID NO: 1294 - DNA, 20 bp, Homo sapiens
tttcatggttcaattgattg

SEQ ID NO: 1295 - DNA, 20 bp, Homo sapiens
atggtatttaaaatttttca

SEQ ID NO: 1296 - DNA, 20 bp, Homo sapiens
ttttatgatgctactgtaaa

SEQ ID NO: 1297 - DNA, 20 bp, Homo sapiens
agagaataatttaccaaatt

SEQ ID NO: 1298 - DNA, 20 bp, Homo sapiens
tatagacatttctcctaatt

SEQ ID NO: 1299 - DNA, 20 bp, Homo sapiens
ttaaaactgcaatataaacc

SEQ ID NO: 1300 - DNA, 20 bp, Homo sapiens
caggcatgagccatggtgcc

SEQ ID NO: 1301 - DNA, 20 bp, Homo sapiens
gcaatataaaccaggcacca

SEQ ID NO: 1302 - DNA, 20 bp, Homo sapiens
gggattacaggcatgagcca

SEQ ID NO: 1303 - DNA, 20 bp, Homo sapiens
tcccaaagtgctgggattac

SEQ ID NO: 1304 - DNA, 20 bp, Homo sapiens
ccttgacctcccaaagtgct

SEQ ID NO: 1305 - DNA, 20 bp, Homo sapiens
tgcctgtaatcccagcactt

SEQ ID NO: 1306 - DNA, 20 bp, Homo sapiens
accttgacctcccaaagtgc

SEQ ID NO: 1307 - DNA, 20 bp, Homo sapiens
gcctgtaatcccagcacttt

SEQ ID NO: 1308 - DNA, 20 bp, Homo sapiens
tgtaatcccagcactttggg

SEQ ID NO: 1309 - DNA, 20 bp, Homo sapiens
cccagcactttgggaggtca

SEQ ID NO: 1310 - DNA, 20 bp, Homo sapiens
agcactttgggaggtcaagg

SEQ ID NO: 1311 - DNA, 20 bp, Homo sapiens
acttctgggctcaagtgatc

SEQ ID NO: 1312 - DNA, 20 bp, Homo sapiens
caggctggtctcaaacttct

SEQ ID NO: 1313 - DNA, 20 bp, Homo sapiens
ccaggctggtctcaaacttc

SEQ ID NO: 1314 - DNA, 20 bp, Homo sapiens
ccagaagtttgagaccagcc

SEQ ID NO: 1315 - DNA, 20 bp, Homo sapiens
cagaagtttgagaccagcct

SEQ ID NO: 1316 - DNA, 20 bp, Homo sapiens
tctcactatgtcacccaggc

SEQ ID NO: 1317 - DNA, 20 bp, Homo sapiens
agggtctcactatgtcaccc

SEQ ID NO: 1318 - DNA, 20 bp, Homo sapiens
tttttttttttgtagagaca

SEQ ID NO: 1319 - DNA, 20 bp, Homo sapiens
ttttttttttttgtagagac

SEQ ID NO: 1320 - DNA, 20 bp, Homo sapiens
aaaaaaaaaaaaaaattagc

SEQ ID NO: 1321 - DNA, 20 bp, Homo sapiens
aaaaaaaaaaaaaattagct

SEQ ID NO: 1322 - DNA, 20 bp, Homo sapiens
aaaaaaaaattagctgggca

SEQ ID NO: 1323 - DNA, 20 bp, Homo sapiens
aaaaaattagctgggcatgg

SEQ ID NO: 1324 - DNA, 20 bp, Homo sapiens
tcctgagtagcaggggctac

SEQ ID NO: 1325 - DNA, 20 bp, Homo sapiens
ctcagcctcctgagtagcag

SEQ ID NO: 1326 - DNA, 20 bp, Homo sapiens
cctcagcctcctgagtagca

SEQ ID NO: 1327 - DNA, 20 bp, Homo sapiens
acctcagcctcctgagtagc

SEQ ID NO: 1328 - DNA, 20 bp, Homo sapiens
acctgtagcccctgctactc

SEQ ID NO: 1329 - DNA, 20 bp, Homo sapiens
tgtagcccctgctactcagg

SEQ ID NO: 1330 - DNA, 20 bp, Homo sapiens
ccctgctactcaggaggctg

SEQ ID NO: 1331 - DNA, 20 bp, Homo sapiens
actcaggaggctgaggtgag

SEQ ID NO: 1332 - DNA, 20 bp, Homo sapiens
gaggatgacttgagcccagt

SEQ ID NO: 1333 - DNA, 20 bp, Homo sapiens
cactgcaatctctgcctact

SEQ ID NO: 1334 - DNA, 20 bp, Homo sapiens
gcactgcaatctctgcctac

SEQ ID NO: 1335 - DNA, 20 bp, Homo sapiens
gattgcagtgcattccagcc

SEQ ID NO: 1336 - DNA, 20 bp, Homo sapiens
attgcagtgcattccagcct

SEQ ID NO: 1337 - DNA, 20 bp, Homo sapiens
tcttgctgtgtagcccaggc

SEQ ID NO: 1338 - DNA, 20 bp, Homo sapiens
agggtcttgctgtgtagccc

SEQ ID NO: 1339 - DNA, 20 bp, Homo sapiens
ttaaagaagacataaataaa

SEQ ID NO: 1340 - DNA, 20 bp, Homo sapiens
ggagaaatataccatgctca

SEQ ID NO: 1341 - DNA, 20 bp, Homo sapiens
agtcttccaatccatgagca

SEQ ID NO: 1342 - DNA, 20 bp, Homo sapiens
aatataccatgctcatggat

SEQ ID NO: 1343 - DNA, 20 bp, Homo sapiens
aactgtcacttctccccaga

SEQ ID NO: 1344 - DNA, 20 bp, Homo sapiens
ggactctgtagatccatctg

SEQ ID NO: 1345 - DNA, 20 bp, Homo sapiens
tggactctgtagatccatct

SEQ ID NO: 1346 - DNA, 20 bp, Homo sapiens
gtggactctgtagatccatc

SEQ ID NO: 1347 - DNA, 20 bp, Homo sapiens
gagttttaagtgagattatg

SEQ ID NO: 1348 - DNA, 20 bp, Homo sapiens
aactttacaaaaatttcttc

SEQ ID NO: 1349 - DNA, 20 bp, Homo sapiens
ttttacatagtaatcagaat

SEQ ID NO: 1350 - DNA, 20 bp, Homo sapiens
aatcagaataggttgatatt

SEQ ID NO: 1351 - DNA, 20 bp, Homo sapiens
aggatagacagatagttcaa

SEQ ID NO: 1352 - DNA, 20 bp, Homo sapiens
tcaatggactatttctgtgt

SEQ ID NO: 1353 - DNA, 20 bp, Homo sapiens
agcaactcttaaaaaatcaa

SEQ ID NO: 1354 - DNA, 20 bp, Homo sapiens
ttaagagttgctttttgata

SEQ ID NO: 1355 - DNA, 20 bp, Homo sapiens
taagagttgctttttgataa

SEQ ID NO: 1356 - DNA, 20 bp, Homo sapiens
gctttttgataagggtgcta

SEQ ID NO: 1357 - DNA, 20 bp, Homo sapiens
taaggtaatgtgatagagaa

SEQ ID NO: 1358 - DNA, 20 bp, Homo sapiens
gaaagtattttcaattcaaa

SEQ ID NO: 1359 - DNA, 20 bp, Homo sapiens
attcaaatggctgaaatgac

SEQ ID NO: 1360 - DNA, 20 bp, Homo sapiens
aaatgactggatatccattg

SEQ ID NO: 1361 - DNA, 20 bp, Homo sapiens
aatgactggatatccattga

SEQ ID NO: 1362 - DNA, 20 bp, Homo sapiens
aagtccctttcttccctcaa

SEQ ID NO: 1363 - DNA, 20 bp, Homo sapiens
gatatccattgagggaagaa

SEQ ID NO: 1364 - DNA, 20 bp, Homo sapiens
atatccattgagggaagaaa

SEQ ID NO: 1365 - DNA, 20 bp, Homo sapiens
atttttgtgtattgtgtgaa

SEQ ID NO: 1366 - DNA, 20 bp, Homo sapiens
cacacaatacacaaaaatta

SEQ ID NO: 1367 - DNA, 20 bp, Homo sapiens
agagaaaatgttcatgaact

SEQ ID NO: 1368 - DNA, 20 bp, Homo sapiens
gagaaaatgttcatgaactt

SEQ ID NO: 1369 - DNA, 20 bp, Homo sapiens
agaaaatgttcatgaacttg

SEQ ID NO: 1370 - DNA, 20 bp, Homo sapiens
aatgttcatgaacttggggt

SEQ ID NO: 1371 - DNA, 20 bp, Homo sapiens
aggcaaaaatttaatagatg

SEQ ID NO: 1372 - DNA, 20 bp, Homo sapiens
gatgaggcaaaaaaaaaaaa

SEQ ID NO: 1373 - DNA, 20 bp, Homo sapiens
tgaaaccatttttatggttt

SEQ ID NO: 1374 - DNA, 20 bp, Homo sapiens
atgaaaccatttttatggtt

SEQ ID NO: 1375 - DNA, 20 bp, Homo sapiens
aaaggcccaaaccataaaaa

SEQ ID NO: 1376 - DNA, 20 bp, Homo sapiens
taaaaatgaaaccattttta

SEQ ID NO: 1377 - DNA, 20 bp, Homo sapiens
aaaatggtttcatttttata

SEQ ID NO: 1378 - DNA, 20 bp, Homo sapiens
tccttaatttttcttttgaa

SEQ ID NO: 1379 - DNA, 20 bp, Homo sapiens
ttccttaatttttcttttga

SEQ ID NO: 1380 - DNA, 20 bp, Homo sapiens
tcccttcaaaagaaaaatta

SEQ ID NO: 1381 - DNA, 20 bp, Homo sapiens
aaatattttctttcagtcgg

SEQ ID NO: 1382 - DNA, 20 bp, Homo sapiens
aacaaatattttctttcagt

SEQ ID NO: 1383 - DNA, 20 bp, Homo sapiens
gtattttgtttttcatttta

SEQ ID NO: 1384 - DNA, 20 bp, Homo sapiens
tattttgtttttcattttat

SEQ ID NO: 1385 - DNA, 20 bp, Homo sapiens
tcattttatgggttcatagt

SEQ ID NO: 1386 - DNA, 20 bp, Homo sapiens
atagtaggtgtatatattta

SEQ ID NO: 1387 - DNA, 20 bp, Homo sapiens
tagtaggtgtatatatttat

SEQ ID NO: 1388 - DNA, 20 bp, Homo sapiens
agtaggtgtatatatttatg

SEQ ID NO: 1389 - DNA, 20 bp, Homo sapiens
gactgaaccacaatatctca

SEQ ID NO: 1390 - DNA, 20 bp, Homo sapiens
tgactgaaccacaatatctc

SEQ ID NO: 1391 - DNA, 20 bp, Homo sapiens
atggggtccctgagatattg

SEQ ID NO: 1392 - DNA, 20 bp, Homo sapiens
attgtggttcagtcatacaa

SEQ ID NO: 1393 - DNA, 20 bp, Homo sapiens
acaatggaaaattcacatca

SEQ ID NO: 1394 - DNA, 20 bp, Homo sapiens
aaattcacatcatggagaac

SEQ ID NO: 1395 - DNA, 20 bp, Homo sapiens
aggataattgctcaagagga

SEQ ID NO: 1396 - DNA, 20 bp, Homo sapiens
acaaaggataattgctcaag

SEQ ID NO: 1397 - DNA, 20 bp, Homo sapiens
ttggattgtttgtaacacaa

SEQ ID NO: 1398 - DNA, 20 bp, Homo sapiens
aataactaaaagagtatagt

SEQ ID NO: 1399 - DNA, 20 bp, Homo sapiens
ttttttttttttttttgaga

SEQ ID NO: 1400 - DNA, 20 bp, Homo sapiens
ggagtctcgctctgtcaccc

SEQ ID NO: 1401 - DNA, 20 bp, Homo sapiens
tctcgctctgtcacccaggc

SEQ ID NO: 1402 - DNA, 20 bp, Homo sapiens
gcgccaccacactccagcct

SEQ ID NO: 1403 - DNA, 20 bp, Homo sapiens
ggcgccaccacactccagcc

SEQ ID NO: 1404 - DNA, 20 bp, Homo sapiens
ctgtcacccaggctggagtg

SEQ ID NO: 1405 - DNA, 20 bp, Homo sapiens
tcacccaggctggagtgtgg

SEQ ID NO: 1406 - DNA, 20 bp, Homo sapiens
gaggttgcagtgagttgaga

SEQ ID NO: 1407 - DNA, 20 bp, Homo sapiens
cacttaaacctgggaggcgg

SEQ ID NO: 1408 - DNA, 20 bp, Homo sapiens
cactgcaacctccgcctccc

SEQ ID NO: 1409 - DNA, 20 bp, Homo sapiens
aatcacttaaacctgggagg

SEQ ID NO: 1410 - DNA, 20 bp, Homo sapiens
gagaatcacttaaacctggg

SEQ ID NO: 1411 - DNA, 20 bp, Homo sapiens
caggagaatcacttaaacct

SEQ ID NO: 1412 - DNA, 20 bp, Homo sapiens
gcaggagaatcacttaaacc

SEQ ID NO: 1413 - DNA, 20 bp, Homo sapiens
gctactcaggaaactgaggc

SEQ ID NO: 1414 - DNA, 20 bp, Homo sapiens
cccagctactcaggaaactg

SEQ ID NO: 1415 - DNA, 20 bp, Homo sapiens
gcctgtagtcccagctactc

SEQ ID NO: 1416 - DNA, 20 bp, Homo sapiens
gcctcagtttcctgagtagc

SEQ ID NO: 1417 - DNA, 20 bp, Homo sapiens
cctcagtttcctgagtagct

SEQ ID NO: 1418 - DNA, 20 bp, Homo sapiens
tcctgagtagctgggactac

SEQ ID NO: 1419 - DNA, 20 bp, Homo sapiens
aactagccgggcgtggtggt

SEQ ID NO: 1420 - DNA, 20 bp, Homo sapiens
aaactagccgggcgtggtgg

SEQ ID NO: 1421 - DNA, 20 bp, Homo sapiens
caaaaactagccgggcgtgg

SEQ ID NO: 1422 - DNA, 20 bp, Homo sapiens
caggcacccaccaccacgcc

SEQ ID NO: 1423 - DNA, 20 bp, Homo sapiens
atacaaaaactagccgggcg

SEQ ID NO: 1424 - DNA, 20 bp, Homo sapiens
taaaaatacaaaaactagcc

SEQ ID NO: 1425 - DNA, 20 bp, Homo sapiens
ttaaaaatacaaaaactagc

SEQ ID NO: 1426 - DNA, 20 bp, Homo sapiens
ttctttttttttttttgaga

SEQ ID NO: 1427 - DNA, 20 bp, Homo sapiens
tggagtctcgctctgtcgcc

SEQ ID NO: 1428 - DNA, 20 bp, Homo sapiens
ggagtctcgctctgtcgccc

SEQ ID NO: 1429 - DNA, 20 bp, Homo sapiens
tctcgctctgtcgcccgggc

SEQ ID NO: 1430 - DNA, 20 bp, Homo sapiens
gcaccactgcactccagccc

SEQ ID NO: 1431 - DNA, 20 bp, Homo sapiens
tgcaccactgcactccagcc

SEQ ID NO: 1432 - DNA, 20 bp, Homo sapiens
tcgcccgggctggagtgcag

SEQ ID NO: 1433 - DNA, 20 bp, Homo sapiens
ggagtgcagtggtgcaatct

SEQ ID NO: 1434 - DNA, 20 bp, Homo sapiens
ctcctgaacctgggagacgg

SEQ ID NO: 1435 - DNA, 20 bp, Homo sapiens
cactgcaacctccgtctccc

SEQ ID NO: 1436 - DNA, 20 bp, Homo sapiens
aatctcctgaacctgggaga

SEQ ID NO: 1437 - DNA, 20 bp, Homo sapiens
aacctccgtctcccaggttc

SEQ ID NO: 1438 - DNA, 20 bp, Homo sapiens
caggagaatctcctgaacct

SEQ ID NO: 1439 - DNA, 20 bp, Homo sapiens
gcaggagaatctcctgaacc

SEQ ID NO: 1440 - DNA, 20 bp, Homo sapiens
gctacttgggaggctgaggc

SEQ ID NO: 1441 - DNA, 20 bp, Homo sapiens
cccagctacttgggaggctg

SEQ ID NO: 1442 - DNA, 20 bp, Homo sapiens
tgtaatcccagctacttggg

SEQ ID NO: 1443 - DNA, 20 bp, Homo sapiens
gcctgtaatcccagctactt

SEQ ID NO: 1444 - DNA, 20 bp, Homo sapiens
gcctcagcctcccaagtagc

SEQ ID NO: 1445 - DNA, 20 bp, Homo sapiens
tgcctgtaatcccagctact

SEQ ID NO: 1446 - DNA, 20 bp, Homo sapiens
cctcagcctcccaagtagct

SEQ ID NO: 1447 - DNA, 20 bp, Homo sapiens
tcccaagtagctgggattac

SEQ ID NO: 1448 - DNA, 20 bp, Homo sapiens
aaaaaattagctgggtgtgg

SEQ ID NO: 1449 - DNA, 20 bp, Homo sapiens
tacaaaaaattagctgggtg

SEQ ID NO: 1450 - DNA, 20 bp, Homo sapiens
aaaaatacaaaaaattagct

SEQ ID NO: 1451 - DNA, 20 bp, Homo sapiens
taaaaatacaaaaaattagc

SEQ ID NO: 1452 - DNA, 20 bp, Homo sapiens
attttttgtatttttagtag

SEQ ID NO: 1453 - DNA, 20 bp, Homo sapiens
tttgtatttttagtagaggc

SEQ ID NO: 1454 - DNA, 20 bp, Homo sapiens
gaggcaggatttcaccgtgt

SEQ ID NO: 1455 - DNA, 20 bp, Homo sapiens
cgagtctagcctgaccaaca

SEQ ID NO: 1456 - DNA, 20 bp, Homo sapiens
aggatttcaccgtgttggtc

SEQ ID NO: 1457 - DNA, 20 bp, Homo sapiens
ggtgggtggatcacgaggtc

SEQ ID NO: 1458 - DNA, 20 bp, Homo sapiens
gccgaggtgggtggatcacg

SEQ ID NO: 1459 - DNA, 20 bp, Homo sapiens
ctttgggaggccgaggtggg

SEQ ID NO: 1460 - DNA, 20 bp, Homo sapiens
acctcgtgatccacccacct

SEQ ID NO: 1461 - DNA, 20 bp, Homo sapiens
gcactttgggaggccgaggt

SEQ ID NO: 1462 - DNA, 20 bp, Homo sapiens
agcactttgggaggccgagg

SEQ ID NO: 1463 - DNA, 20 bp, Homo sapiens
cccagcactttgggaggccg

SEQ ID NO: 1464 - DNA, 20 bp, Homo sapiens
cgtaaccccagcactttggg

SEQ ID NO: 1465 - DNA, 20 bp, Homo sapiens
gcccgtaaccccagcacttt

SEQ ID NO: 1466 - DNA, 20 bp, Homo sapiens
acctcggcctcccaaagtgc

SEQ ID NO: 1467 - DNA, 20 bp, Homo sapiens
cgcccgtaaccccagcactt

SEQ ID NO: 1468 - DNA, 20 bp, Homo sapiens
cctcggcctcccaaagtgct

SEQ ID NO: 1469 - DNA, 20 bp, Homo sapiens
ctcggcctcccaaagtgctg

SEQ ID NO: 1470 - DNA, 20 bp, Homo sapiens
ctcccaaagtgctggggtta

SEQ ID NO: 1471 - DNA, 20 bp, Homo sapiens
tcccaaagtgctggggttac

SEQ ID NO: 1472 - DNA, 20 bp, Homo sapiens
aaaactaaggccaggcgtgg

SEQ ID NO: 1473 - DNA, 20 bp, Homo sapiens
cgggcgtgagccaccacgcc

SEQ ID NO: 1474 - DNA, 20 bp, Homo sapiens
acaaaaactaaggccaggcg

SEQ ID NO: 1475 - DNA, 20 bp, Homo sapiens
aaaatacaaaaactaaggcc

SEQ ID NO: 1476 - DNA, 20 bp, Homo sapiens
tactaaaaatacaaaaacta

SEQ ID NO: 1477 - DNA, 20 bp, Homo sapiens
ttgtatttttagtagagatg

SEQ ID NO: 1478 - DNA, 20 bp, Homo sapiens
gagatgaggtttcaccatgt

SEQ ID NO: 1479 - DNA, 20 bp, Homo sapiens
caagaccagcctggccaaca

SEQ ID NO: 1480 - DNA, 20 bp, Homo sapiens
gaggtttcaccatgttggcc

SEQ ID NO: 1481 - DNA, 20 bp, Homo sapiens
tttcaccatgttggccaggc

SEQ ID NO: 1482 - DNA, 20 bp, Homo sapiens
tcaggagttcaagaccagcc

SEQ ID NO: 1483 - DNA, 20 bp, Homo sapiens
ggtcttgaactcctgatctc

SEQ ID NO: 1484 - DNA, 20 bp, Homo sapiens
caggtggatcacctgagatc

SEQ ID NO: 1485 - DNA, 20 bp, Homo sapiens
ctttgggaggccgaggcagg

SEQ ID NO: 1486 - DNA, 20 bp, Homo sapiens
ctcaggtgatccacctgcct

SEQ ID NO: 1487 - DNA, 20 bp, Homo sapiens
gcactttgggaggccgaggc

SEQ ID NO: 1488 - DNA, 20 bp, Homo sapiens
ctcagcactttgggaggccg

SEQ ID NO: 1489 - DNA, 20 bp, Homo sapiens
tgtaatctcagcactttggg

SEQ ID NO: 1490 - DNA, 20 bp, Homo sapiens
gcctgtaatctcagcacttt

SEQ ID NO: 1491 - DNA, 20 bp, Homo sapiens
tgcctgtaatctcagcactt

SEQ ID NO: 1492 - DNA, 20 bp, Homo sapiens
tcccaaagtgctgagattac

SEQ ID NO: 1493 - DNA, 20 bp, Homo sapiens
aaaagagaggtcgggcacag

SEQ ID NO: 1494 - DNA, 20 bp, Homo sapiens
aaataactaaaagagaggtc

SEQ ID NO: 1495 - DNA, 20 bp, Homo sapiens
aaaataactaaaagagaggt

SEQ ID NO: 1496 - DNA, 20 bp, Homo sapiens
tttaaaaataactaaaagag

SEQ ID NO: 1497 - DNA, 20 bp, Homo sapiens
cagtatttgatagcataaca

SEQ ID NO: 1498 - DNA, 20 bp, Homo sapiens
ccagtatttgatagcataac

SEQ ID NO: 1499 - DNA, 20 bp, Homo sapiens
cctgttatgctatcaaatac

SEQ ID NO: 1500 - DNA, 20 bp, Homo sapiens
ctgttatgctatcaaatact

SEQ ID NO: 1501 - DNA, 20 bp, Homo sapiens
ggtgagagggtatgtaggga

SEQ ID NO: 1502 - DNA, 20 bp, Homo sapiens
caggggtgagagggtatgta

SEQ ID NO: 1503 - DNA, 20 bp, Homo sapiens
gcaggggtgagagggtatgt

SEQ ID NO: 1504 - DNA, 20 bp, Homo sapiens
gggtagtggcaggggtgaga

SEQ ID NO: 1505 - DNA, 20 bp, Homo sapiens
agggtagtggcaggggtgag

SEQ ID NO: 1506 - DNA, 20 bp, Homo sapiens
acttggaagggtagtggcag

SEQ ID NO: 1507 - DNA, 20 bp, Homo sapiens
gacttggaagggtagtggca

SEQ ID NO: 1508 - DNA, 20 bp, Homo sapiens
agacttggaagggtagtggc

SEQ ID NO: 1509 - DNA, 20 bp, Homo sapiens
gcagagacttggaagggtag

SEQ ID NO: 1510 - DNA, 20 bp, Homo sapiens
tggttcgcagagacttggaa

SEQ ID NO: 1511 - DNA, 20 bp, Homo sapiens
atggttcgcagagacttgga

SEQ ID NO: 1512 - DNA, 20 bp, Homo sapiens
aaggatggttcgcagagact

SEQ ID NO: 1513 - DNA, 20 bp, Homo sapiens
ggagatagagaatagaagga

SEQ ID NO: 1514 - DNA, 20 bp, Homo sapiens
tcatggagatagagaataga

SEQ ID NO: 1515 - DNA, 20 bp, Homo sapiens
catcgaaacaattaaactca

SEQ ID NO: 1516 - DNA, 20 bp, Homo sapiens
agtgtctgtctctctgtgcc

SEQ ID NO: 1517 - DNA, 20 bp, Homo sapiens
attacaaatattttctcgcc

SEQ ID NO: 1518 - DNA, 20 bp, Homo sapiens
atatttgtaatatttgtatt

SEQ ID NO: 1519 - DNA, 20 bp, Homo sapiens
gtaatatttgtatttggcaa

SEQ ID NO: 1520 - DNA, 20 bp, Homo sapiens
cagaatttatttctatattt

SEQ ID NO: 1521 - DNA, 20 bp, Homo sapiens
ttctactttttgtagacact

SEQ ID NO: 1522 - DNA, 20 bp, Homo sapiens
attctactttttgtagacac

SEQ ID NO: 1523 - DNA, 20 bp, Homo sapiens
caaaaagtagaataattagc

SEQ ID NO: 1524 - DNA, 20 bp, Homo sapiens
cctcagcctcctgattaggt

SEQ ID NO: 1525 - DNA, 20 bp, Homo sapiens
ccctcagcctcctgattagg

SEQ ID NO: 1526 - DNA, 20 bp, Homo sapiens
gtctgtagtcccacctaatc

SEQ ID NO: 1527 - DNA, 20 bp, Homo sapiens
tccccctcagcctcctgatt

SEQ ID NO: 1528 - DNA, 20 bp, Homo sapiens
tgtagtcccacctaatcagg

SEQ ID NO: 1529 - DNA, 20 bp, Homo sapiens
cccacctaatcaggaggctg

SEQ ID NO: 1530 - DNA, 20 bp, Homo sapiens
ccacctaatcaggaggctga

SEQ ID NO: 1531 - DNA, 20 bp, Homo sapiens
cacctaatcaggaggctgag

SEQ ID NO: 1532 - DNA, 20 bp, Homo sapiens
acctaatcaggaggctgagg

SEQ ID NO: 1533 - DNA, 20 bp, Homo sapiens
gggaaagatcacttaagctc

SEQ ID NO: 1534 - DNA, 20 bp, Homo sapiens
cacttaagctcaggagttcg

SEQ ID NO: 1535 - DNA, 20 bp, Homo sapiens
tcacccaggctggagtgcag

SEQ ID NO: 1536 - DNA, 20 bp, Homo sapiens
cgtgccactgcactccagcc

SEQ ID NO: 1537 - DNA, 20 bp, Homo sapiens
gtgccactgcactccagcct

SEQ ID NO: 1538 - DNA, 20 bp, Homo sapiens
tcttactctgtcacccaggc

SEQ ID NO: 1539 - DNA, 20 bp, Homo sapiens
aggatcttactctgtcaccc

SEQ ID NO: 1540 - DNA, 20 bp, Homo sapiens
tatttttattttttttagac

SEQ ID NO: 1541 - DNA, 20 bp, Homo sapiens
tctaaaaaaaataaaaatag

SEQ ID NO: 1542 - DNA, 20 bp, Homo sapiens
ctaaaaaaaataaaaataga

SEQ ID NO: 1543 - DNA, 20 bp, Homo sapiens
aaaaataaaaatagagggcc

SEQ ID NO: 1544 - DNA, 20 bp, Homo sapiens
taaaaatagagggccaggtg

SEQ ID NO: 1545 - DNA, 20 bp, Homo sapiens
caggcataagccacctcacc

SEQ ID NO: 1546 - DNA, 20 bp, Homo sapiens
aaatagagggccaggtgagg

SEQ ID NO: 1547 - DNA, 20 bp, Homo sapiens
tcccaatgtgctgggattac

SEQ ID NO: 1548 - DNA, 20 bp, Homo sapiens
cctcagcctcccaatgtgct

SEQ ID NO: 1549 - DNA, 20 bp, Homo sapiens
tgcctgtaatcccagcacat

SEQ ID NO: 1550 - DNA, 20 bp, Homo sapiens
gcctcagcctcccaatgtgc

SEQ ID NO: 1551 - DNA, 20 bp, Homo sapiens
gcctgtaatcccagcacatt

SEQ ID NO: 1552 - DNA, 20 bp, Homo sapiens
tgtaatcccagcacattggg

SEQ ID NO: 1553 - DNA, 20 bp, Homo sapiens
cccagcacattgggaggctg

SEQ ID NO: 1554 - DNA, 20 bp, Homo sapiens
gcacattgggaggctgaggc

SEQ ID NO: 1555 - DNA, 20 bp, Homo sapiens
cattgggaggctgaggcagg

SEQ ID NO: 1556 - DNA, 20 bp, Homo sapiens
caggtggattgcttaagccc

SEQ ID NO: 1557 - DNA, 20 bp, Homo sapiens
caggctggtcttgaactcct

SEQ ID NO: 1558 - DNA, 20 bp, Homo sapiens
ccaggctggtcttgaactcc

SEQ ID NO: 1559 - DNA, 20 bp, Homo sapiens
ccaggagttcaagaccagcc

SEQ ID NO: 1560 - DNA, 20 bp, Homo sapiens
caggagttcaagaccagcct

SEQ ID NO: 1561 - DNA, 20 bp, Homo sapiens
tttcaccatgttgcccaggc

SEQ ID NO: 1562 - DNA, 20 bp, Homo sapiens
ggggtttcaccatgttgccc

SEQ ID NO: 1563 - DNA, 20 bp, Homo sapiens
caagaccagcctgggcaaca

SEQ ID NO: 1564 - DNA, 20 bp, Homo sapiens
ttgtggttttggtagagatg

SEQ ID NO: 1565 - DNA, 20 bp, Homo sapiens
tttgtggttttggtagagat

SEQ ID NO: 1566 - DNA, 20 bp, Homo sapiens
ttttgtggttttggtagaga

SEQ ID NO: 1567 - DNA, 20 bp, Homo sapiens
tagctgattttttgtggttt

SEQ ID NO: 1568 - DNA, 20 bp, Homo sapiens
cacatctagctgattttttg

SEQ ID NO: 1569 - DNA, 20 bp, Homo sapiens
cacaaaaaatcagctagatg

SEQ ID NO: 1570 - DNA, 20 bp, Homo sapiens
ttttgagtagctgagactat

SEQ ID NO: 1571 - DNA, 20 bp, Homo sapiens
tatagtctcagctactcaaa

SEQ ID NO: 1572 - DNA, 20 bp, Homo sapiens
ctcagctactcaaaaggctg

SEQ ID NO: 1573 - DNA, 20 bp, Homo sapiens
agctactcaaaaggctgagg

SEQ ID NO: 1574 - DNA, 20 bp, Homo sapiens
gctactcaaaaggctgaggt

SEQ ID NO: 1575 - DNA, 20 bp, Homo sapiens
actcaaaaggctgaggtggg

SEQ ID NO: 1576 - DNA, 20 bp, Homo sapiens
tgggaggatcacctgagccc

SEQ ID NO: 1577 - DNA, 20 bp, Homo sapiens
agcctcgacttcctgggctc

SEQ ID NO: 1578 - DNA, 20 bp, Homo sapiens
cactacagcctcgacttcct

SEQ ID NO: 1579 - DNA, 20 bp, Homo sapiens
tcactacagcctcgacttcc

SEQ ID NO: 1580 - DNA, 20 bp, Homo sapiens
cacctgagcccaggaagtcg

SEQ ID NO: 1581 - DNA, 20 bp, Homo sapiens
ggagtgtggtggcatgatca

SEQ ID NO: 1582 - DNA, 20 bp, Homo sapiens
ttgcccaggctggagtgtgg

SEQ ID NO: 1583 - DNA, 20 bp, Homo sapiens
cagttgcccaggctggagtg

SEQ ID NO: 1584 - DNA, 20 bp, Homo sapiens
catgccaccacactccagcc

SEQ ID NO: 1585 - DNA, 20 bp, Homo sapiens
atgccaccacactccagcct

SEQ ID NO: 1586 - DNA, 20 bp, Homo sapiens
cccactccagttgcccaggc

SEQ ID NO: 1587 - DNA, 20 bp, Homo sapiens
cagtcccactccagttgccc

SEQ ID NO: 1588 - DNA, 20 bp, Homo sapiens
cacactccagcctgggcaac

SEQ ID NO: 1589 - DNA, 20 bp, Homo sapiens
tccagcctgggcaactggag

SEQ ID NO: 1590 - DNA, 20 bp, Homo sapiens
ccagcctgggcaactggagt

SEQ ID NO: 1591 - DNA, 20 bp, Homo sapiens
tacttatatatatttttggg

SEQ ID NO: 1592 - DNA, 20 bp, Homo sapiens
ttacttatatatatttttgg

SEQ ID NO: 1593 - DNA, 20 bp, Homo sapiens
tttacttatatatatttttg

SEQ ID NO: 1594 - DNA, 20 bp, Homo sapiens
atttacttatatatattttt

SEQ ID NO: 1595 - DNA, 20 bp, Homo sapiens
tatttacttatatatatttt

SEQ ID NO: 1596 - DNA, 20 bp, Homo sapiens
aataaaatgagctaaagatc

SEQ ID NO: 1597 - DNA, 20 bp, Homo sapiens
aatgagctaaagatctggac

SEQ ID NO: 1598 - DNA, 20 bp, Homo sapiens
cttcataagaagcaagcaaa

SEQ ID NO: 1599 - DNA, 20 bp, Homo sapiens
tcatcttttcatgtatttat

SEQ ID NO: 1600 - DNA, 20 bp, Homo sapiens
agtgtgtccaatgactaagg

SEQ ID NO: 1601 - DNA, 20 bp, Homo sapiens
ctaagtgtgtccaatgacta

SEQ ID NO: 1602 - DNA, 20 bp, Homo sapiens
tgatttacctccttagtcat

SEQ ID NO: 1603 - DNA, 20 bp, Homo sapiens
ccatgctagtggatgaggag

SEQ ID NO: 1604 - DNA, 20 bp, Homo sapiens
tttagccatgctagtggatg

SEQ ID NO: 1605 - DNA, 20 bp, Homo sapiens
ccactcctcatccactagca

SEQ ID NO: 1606 - DNA, 20 bp, Homo sapiens
ttatcctttagccatgctag

SEQ ID NO: 1607 - DNA, 20 bp, Homo sapiens
tcatccactagcatggctaa

SEQ ID NO: 1608 - DNA, 20 bp, Homo sapiens
cagtccttgccaacacttga

SEQ ID NO: 1609 - DNA, 20 bp, Homo sapiens
aaagagtgaccatcaagtgt

SEQ ID NO: 1610 - DNA, 20 bp, Homo sapiens
gtgaccatcaagtgttggca

SEQ ID NO: 1611 - DNA, 20 bp, Homo sapiens
tcaagtgttggcaaggactg

SEQ ID NO: 1612 - DNA, 20 bp, Homo sapiens
ctgtggttctcgtacattcc

SEQ ID NO: 1613 - DNA, 20 bp, Homo sapiens
tggttctcgtacattcctgg

SEQ ID NO: 1614 - DNA, 20 bp, Homo sapiens
ggttctcgtacattcctggc

SEQ ID NO: 1615 - DNA, 20 bp, Homo sapiens
ctgaattttccattcccgcc

SEQ ID NO: 1616 - DNA, 20 bp, Homo sapiens
tcgtacattcctggcgggaa

SEQ ID NO: 1617 - DNA, 20 bp, Homo sapiens
ggaaaattcagtcaccactt

SEQ ID NO: 1618 - DNA, 20 bp, Homo sapiens
taagaaactgtgttccaaag

SEQ ID NO: 1619 - DNA, 20 bp, Homo sapiens
aatggaaaagatgggtcata

SEQ ID NO: 1620 - DNA, 20 bp, Homo sapiens
taccaaggaatggaaaagat

SEQ ID NO: 1621 - DNA, 20 bp, Homo sapiens
ataccaaggaatggaaaaga

SEQ ID NO: 1622 - DNA, 20 bp, Homo sapiens
gacccatcttttccattcct

SEQ ID NO: 1623 - DNA, 20 bp, Homo sapiens
cttgagtaaataccaaggaa

SEQ ID NO: 1624 - DNA, 20 bp, Homo sapiens
tttcccttgagtaaatacca

SEQ ID NO: 1625 - DNA, 20 bp, Homo sapiens
cattccttggtatttactca

SEQ ID NO: 1626 - DNA, 20 bp, Homo sapiens
attccttggtatttactcaa

SEQ ID NO: 1627 - DNA, 20 bp, Homo sapiens
ctcaagggaaatgaaaacac

SEQ ID NO: 1628 - DNA, 20 bp, Homo sapiens
cactcatgtgcaggtatttg

SEQ ID NO: 1629 - DNA, 20 bp, Homo sapiens
ttctgtaaacactcatgtgc

SEQ ID NO: 1630 - DNA, 20 bp, Homo sapiens
tacagaagctttgttgctag

SEQ ID NO: 1631 - DNA, 20 bp, Homo sapiens
tgtggttttttcactgttcg

SEQ ID NO: 1632 - DNA, 20 bp, Homo sapiens
ctgtggttttttcactgttc

SEQ ID NO: 1633 - DNA, 20 bp, Homo sapiens
actgtggttttttcactgtt

SEQ ID NO: 1634 - DNA, 20 bp, Homo sapiens
tctcctattgacagacactg

SEQ ID NO: 1635 - DNA, 20 bp, Homo sapiens
aaaccacagtgtctgtcaat

SEQ ID NO: 1636 - DNA, 20 bp, Homo sapiens
gagacagaataaatgaattg

SEQ ID NO: 1637 - DNA, 20 bp, Homo sapiens
acagaataaatgaattgtgg

SEQ ID NO: 1638 - DNA, 20 bp, Homo sapiens
gaattgtggcggattaacaa

SEQ ID NO: 1639 - DNA, 20 bp, Homo sapiens
attgatacacgtgacaatat

SEQ ID NO: 1640 - DNA, 20 bp, Homo sapiens
tgaatcttcaaaacagcatg

SEQ ID NO: 1641 - DNA, 20 bp, Homo sapiens
aaacagcatgcggtgtgatg

SEQ ID NO: 1642 - DNA, 20 bp, Homo sapiens
gatacatgctcttttatgtc

SEQ ID NO: 1643 - DNA, 20 bp, Homo sapiens
cataaaagagcatgtatcag

SEQ ID NO: 1644 - DNA, 20 bp, Homo sapiens
gtatcagaggattccgtgta

SEQ ID NO: 1645 - DNA, 20 bp, Homo sapiens
tatcagaggattccgtgtat

SEQ ID NO: 1646 - DNA, 20 bp, Homo sapiens
tccctggcgtttcccataca

SEQ ID NO: 1647 - DNA, 20 bp, Homo sapiens
ttccgtgtatgggaaacgcc

SEQ ID NO: 1648 - DNA, 20 bp, Homo sapiens
tccgtgtatgggaaacgcca

SEQ ID NO: 1649 - DNA, 20 bp, Homo sapiens
caaccatggatctgattccc

SEQ ID NO: 1650 - DNA, 20 bp, Homo sapiens
acgccagggaatcagatcca

SEQ ID NO: 1651 - DNA, 20 bp, Homo sapiens
cctcctgaccctgacaacca

SEQ ID NO: 1652 - DNA, 20 bp, Homo sapiens
gaatcagatccatggttgtc

SEQ ID NO: 1653 - DNA, 20 bp, Homo sapiens
aatcagatccatggttgtca

SEQ ID NO: 1654 - DNA, 20 bp, Homo sapiens
gatccatggttgtcagggtc

SEQ ID NO: 1655 - DNA, 20 bp, Homo sapiens
ccatggttgtcagggtcagg

SEQ ID NO: 1656 - DNA, 20 bp, Homo sapiens
catggttgtcagggtcagga

SEQ ID NO: 1657 - DNA, 20 bp, Homo sapiens
agggtcaggagggaccttac

SEQ ID NO: 1658 - DNA, 20 bp, Homo sapiens
gggtcaggagggaccttact

SEQ ID NO: 1659 - DNA, 20 bp, Homo sapiens
ggtcaggagggaccttactg

SEQ ID NO: 1660 - DNA, 20 bp, Homo sapiens
cacatgtaatcaccccagta

SEQ ID NO: 1661 - DNA, 20 bp, Homo sapiens
atgtgcccactttaggtata

SEQ ID NO: 1662 - DNA, 20 bp, Homo sapiens
tcaaaaccgtatacctaaag

SEQ ID NO: 1663 - DNA, 20 bp, Homo sapiens
caaaaccgtatacctaaagt

SEQ ID NO: 1664 - DNA, 20 bp, Homo sapiens
caataaaatgtgcccacttt

SEQ ID NO: 1665 - DNA, 20 bp, Homo sapiens
ctaaagtgggcacattttat

SEQ ID NO: 1666 - DNA, 20 bp, Homo sapiens
tgaaaattaatttaatttga

SEQ ID NO: 1667 - DNA, 20 bp, Homo sapiens
ttgaaaattaatttaatttg

SEQ ID NO: 1668 - DNA, 20 bp, Homo sapiens
attttcaaagttttaaaaaa

SEQ ID NO: 1669 - DNA, 20 bp, Homo sapiens
ttccttcaatgtggcaaaaa

SEQ ID NO: 1670 - DNA, 20 bp, Homo sapiens
aaccatttttgccacattga

SEQ ID NO: 1671 - DNA, 20 bp, Homo sapiens
gaaataattttccttcaatg

SEQ ID NO: 1672 - DNA, 20 bp, Homo sapiens
tggctgtagggaaatcttgg

SEQ ID NO: 1673 - DNA, 20 bp, Homo sapiens
gtttggctgtagggaaatct

SEQ ID NO: 1674 - DNA, 20 bp, Homo sapiens
tggtagatcgtttggctgta

SEQ ID NO: 1675 - DNA, 20 bp, Homo sapiens
ttggtagatcgtttggctgt

SEQ ID NO: 1676 - DNA, 20 bp, Homo sapiens
tttgtagttggtagatcgtt

SEQ ID NO: 1677 - DNA, 20 bp, Homo sapiens
attttttccatttttgtagt

SEQ ID NO: 1678 - DNA, 20 bp, Homo sapiens
cgatctaccaactacaaaaa

SEQ ID NO: 1679 - DNA, 20 bp, Homo sapiens
aaaaatggaaaaaataattt

SEQ ID NO: 1680 - DNA, 20 bp, Homo sapiens
tcttgaaacagaaacgtggg

SEQ ID NO: 1681 - DNA, 20 bp, Homo sapiens
gcttcttgaaacagaaacgt

SEQ ID NO: 1682 - DNA, 20 bp, Homo sapiens
agcttcttgaaacagaaacg

SEQ ID NO: 1683 - DNA, 20 bp, Homo sapiens
attcgagataaatcgctccg

SEQ ID NO: 1684 - DNA, 20 bp, Homo sapiens
ctttctaagtcctgtgacca

SEQ ID NO: 1685 - DNA, 20 bp, Homo sapiens
ataaatcgctccgtggtcac

SEQ ID NO: 1686 - DNA, 20 bp, Homo sapiens
cgtggtcacaggacttagaa

SEQ ID NO: 1687 - DNA, 20 bp, Homo sapiens
ggtcacaggacttagaaagg

SEQ ID NO: 1688 - DNA, 20 bp, Homo sapiens
cacaggacttagaaaggtgg

SEQ ID NO: 1689 - DNA, 20 bp, Homo sapiens
taacagatgaattagttgaa

SEQ ID NO: 1690 - DNA, 20 bp, Homo sapiens
aacagatgaattagttgaaa

SEQ ID NO: 1691 - DNA, 20 bp, Homo sapiens
tagttgaaagggactgattt

SEQ ID NO: 1692 - DNA, 20 bp, Homo sapiens
agttgaaagggactgatttc

SEQ ID NO: 1693 - DNA, 20 bp, Homo sapiens
gttgaaagggactgatttcg

SEQ ID NO: 1694 - DNA, 20 bp, Homo sapiens
ttgaaagggactgatttcgg

SEQ ID NO: 1695 - DNA, 20 bp, Homo sapiens
aagggactgatttcggggga

SEQ ID NO: 1696 - DNA, 20 bp, Homo sapiens
ctgatttcgggggaaggaat

SEQ ID NO: 1697 - DNA, 20 bp, Homo sapiens
tcgggggaaggaataggaac

SEQ ID NO: 1698 - DNA, 20 bp, Homo sapiens
cgggggaaggaataggaact

SEQ ID NO: 1699 - DNA, 20 bp, Homo sapiens
gaaggaataggaactgggcc

SEQ ID NO: 1700 - DNA, 20 bp, Homo sapiens
cctgaaaggcgtctatctcc

SEQ ID NO: 1701 - DNA, 20 bp, Homo sapiens
ccaggagatagacgcctttc

SEQ ID NO: 1702 - DNA, 20 bp, Homo sapiens
ttcacaagggcaagcctgaa

SEQ ID NO: 1703 - DNA, 20 bp, Homo sapiens
ggggactatcgttttcacaa

SEQ ID NO: 1704 - DNA, 20 bp, Homo sapiens
aggggactatcgttttcaca

SEQ ID NO: 1705 - DNA, 20 bp, Homo sapiens
ctatcccccgcaggtaagag

SEQ ID NO: 1706 - DNA, 20 bp, Homo sapiens
cctatcccccgcaggtaaga

SEQ ID NO: 1707 - DNA, 20 bp, Homo sapiens
acctatcccccgcaggtaag

SEQ ID NO: 1708 - DNA, 20 bp, Homo sapiens
cgatagtcccctcttacctg

SEQ ID NO: 1709 - DNA, 20 bp, Homo sapiens
gatagtcccctcttacctgc

SEQ ID NO: 1710 - DNA, 20 bp, Homo sapiens
atagtcccctcttacctgcg

SEQ ID NO: 1711 - DNA, 20 bp, Homo sapiens
tagtcccctcttacctgcgg

SEQ ID NO: 1712 - DNA, 20 bp, Homo sapiens
tctcggaacctatcccccgc

SEQ ID NO: 1713 - DNA, 20 bp, Homo sapiens
ccctcttacctgcgggggat

SEQ ID NO: 1714 - DNA, 20 bp, Homo sapiens
cagacatccactggggatct

SEQ ID NO: 1715 - DNA, 20 bp, Homo sapiens
ataggttccgagatccccag

SEQ ID NO: 1716 - DNA, 20 bp, Homo sapiens
gtggtttcagacatccactg

SEQ ID NO: 1717 - DNA, 20 bp, Homo sapiens
tgtggtttcagacatccact

SEQ ID NO: 1718 - DNA, 20 bp, Homo sapiens
ctgtggtttcagacatccac

SEQ ID NO: 1719 - DNA, 20 bp, Homo sapiens
gtagggtttggtactatctg

SEQ ID NO: 1720 - DNA, 20 bp, Homo sapiens
aacatactctctgtagggtt

SEQ ID NO: 1721 - DNA, 20 bp, Homo sapiens
gagaaaacatactctctgta

SEQ ID NO: 1722 - DNA, 20 bp, Homo sapiens
ggagaaaacatactctctgt

SEQ ID NO: 1723 - DNA, 20 bp, Homo sapiens
tatcataggtatgtgtgtac

SEQ ID NO: 1724 - DNA, 20 bp, Homo sapiens
tgtacacacatacctatgat

SEQ ID NO: 1725 - DNA, 20 bp, Homo sapiens
gtacacacatacctatgata

SEQ ID NO: 1726 - DNA, 20 bp, Homo sapiens
tataaattaaaccctatcat

SEQ ID NO: 1727 - DNA, 20 bp, Homo sapiens
tagggtttaatttataaatt

SEQ ID NO: 1728 - DNA, 20 bp, Homo sapiens
ttaatttataaattaggcac

SEQ ID NO: 1729 - DNA, 20 bp, Homo sapiens
taatttataaattaggcacc

SEQ ID NO: 1730 - DNA, 20 bp, Homo sapiens
tttataaattaggcaccggg

SEQ ID NO: 1731 - DNA, 20 bp, Homo sapiens
ttataaattaggcaccgggt

SEQ ID NO: 1732 - DNA, 20 bp, Homo sapiens
ttatggttgttaatcccacc

SEQ ID NO: 1733 - DNA, 20 bp, Homo sapiens
ttctattttactattaatta

SEQ ID NO: 1734 - DNA, 20 bp, Homo sapiens
ttataacaatatactgtccg

SEQ ID NO: 1735 - DNA, 20 bp, Homo sapiens
taacaatatactgtccgagg

SEQ ID NO: 1736 - DNA, 20 bp, Homo sapiens
aacaatatactgtccgaggc

SEQ ID NO: 1737 - DNA, 20 bp, Homo sapiens
ttcaagtgatccacccgcct

SEQ ID NO: 1738 - DNA, 20 bp, Homo sapiens
aatatactgtccgaggcggg

SEQ ID NO: 1739 - DNA, 20 bp, Homo sapiens
cgggtggatcacttgaagtc

SEQ ID NO: 1740 - DNA, 20 bp, Homo sapiens
tcaggagatcgagaccagcc

SEQ ID NO: 1741 - DNA, 20 bp, Homo sapiens
tttcaccatgttggccaggc

SEQ ID NO: 1742 - DNA, 20 bp, Homo sapiens
caggtttcaccatgttggcc

SEQ ID NO: 1743 - DNA, 20 bp, Homo sapiens
cgagaccagcctggccaaca

SEQ ID NO: 1744 - DNA, 20 bp, Homo sapiens
agagacaggtttcaccatgt

SEQ ID NO: 1745 - DNA, 20 bp, Homo sapiens
tttgtatttttagtagagac

SEQ ID NO: 1746 - DNA, 20 bp, Homo sapiens
aaaaatacaaaaaattagcc

SEQ ID NO: 1747 - DNA, 20 bp, Homo sapiens
caggcgcccaccactacgcc

SEQ ID NO: 1748 - DNA, 20 bp, Homo sapiens
aaaaaattagccaggcgtag

SEQ ID NO: 1749 - DNA, 20 bp, Homo sapiens
aaattagccaggcgtagtgg

SEQ ID NO: 1750 - DNA, 20 bp, Homo sapiens
aattagccaggcgtagtggt

SEQ ID NO: 1751 - DNA, 20 bp, Homo sapiens
tcccgagtagctgggtttac

SEQ ID NO: 1752 - DNA, 20 bp, Homo sapiens
cctcagcctcccgagtagct

SEQ ID NO: 1753 - DNA, 20 bp, Homo sapiens
cgcctgtaaacccagctact

SEQ ID NO: 1754 - DNA, 20 bp, Homo sapiens
gcctcagcctcccgagtagc

SEQ ID NO: 1755 - DNA, 20 bp, Homo sapiens
gcctgtaaacccagctactc

SEQ ID NO: 1756 - DNA, 20 bp, Homo sapiens
tgtaaacccagctactcggg

SEQ ID NO: 1757 - DNA, 20 bp, Homo sapiens
cccagctactcgggaggctg

SEQ ID NO: 1758 - DNA, 20 bp, Homo sapiens
gctactcgggaggctgaggc

SEQ ID NO: 1759 - DNA, 20 bp, Homo sapiens
gcaggagaattgcttgaacc

SEQ ID NO: 1760 - DNA, 20 bp, Homo sapiens
caggagaattgcttgaaccc

SEQ ID NO: 1761 - DNA, 20 bp, Homo sapiens
gagaattgcttgaacccggg

SEQ ID NO: 1762 - DNA, 20 bp, Homo sapiens
aattgcttgaacccgggagg

SEQ ID NO: 1763 - DNA, 20 bp, Homo sapiens
cactacagcctccgcctccc

SEQ ID NO: 1764 - DNA, 20 bp, Homo sapiens
tcactacagcctccgcctcc

SEQ ID NO: 1765 - DNA, 20 bp, Homo sapiens
tgcttgaacccgggaggcgg

SEQ ID NO: 1766 - DNA, 20 bp, Homo sapiens
cggaggctgtagtgagccga

SEQ ID NO: 1767 - DNA, 20 bp, Homo sapiens
ggagtgcaaaggggcacctt

SEQ ID NO: 1768 - DNA, 20 bp, Homo sapiens
gcccaggctggagtgcaaag

SEQ ID NO: 1769 - DNA, 20 bp, Homo sapiens
tgcccaggctggagtgcaaa

SEQ ID NO: 1770 - DNA, 20 bp, Homo sapiens
ttgcccaggctggagtgcaa

SEQ ID NO: 1771 - DNA, 20 bp, Homo sapiens
tgcccctttgcactccagcc

SEQ ID NO: 1772 - DNA, 20 bp, Homo sapiens
gcccctttgcactccagcct

SEQ ID NO: 1773 - DNA, 20 bp, Homo sapiens
gttttgctcgttgcccaggc

SEQ ID NO: 1774 - DNA, 20 bp, Homo sapiens
tggagttttgctcgttgccc

SEQ ID NO: 1775 - DNA, 20 bp, Homo sapiens
ttttgttgttgtttttgaga

SEQ ID NO: 1776 - DNA, 20 bp, Homo sapiens
aaaacaatatactgtaataa

SEQ ID NO: 1777 - DNA, 20 bp, Homo sapiens
taataaaggttacgtgaatg

SEQ ID NO: 1778 - DNA, 20 bp, Homo sapiens
tgtgtatatatcttagtttg

SEQ ID NO: 1779 - DNA, 20 bp, Homo sapiens
gtgtatatatcttagtttgt

SEQ ID NO: 1780 - DNA, 20 bp, Homo sapiens
tttgtttattattaagagac

SEQ ID NO: 1781 - DNA, 20 bp, Homo sapiens
ttgtttattattaagagaca

SEQ ID NO: 1782 - DNA, 20 bp, Homo sapiens
agggtcttgctctgttaccc

SEQ ID NO: 1783 - DNA, 20 bp, Homo sapiens
tcttgctctgttacccaggc

SEQ ID NO: 1784 - DNA, 20 bp, Homo sapiens
acaccactgcactccagcct

SEQ ID NO: 1785 - DNA, 20 bp, Homo sapiens
cacaccactgcactccagcc

SEQ ID NO: 1786 - DNA, 20 bp, Homo sapiens
ttacccaggctggagtgcag

SEQ ID NO: 1787 - DNA, 20 bp, Homo sapiens
ggagtgcagtggtgtgatca

SEQ ID NO: 1788 - DNA, 20 bp, Homo sapiens
cacttgagcctaggaggtga

SEQ ID NO: 1789 - DNA, 20 bp, Homo sapiens
tactgcagccttcacctcct

SEQ ID NO: 1790 - DNA, 20 bp, Homo sapiens
aaggatcacttgagcctagg

SEQ ID NO: 1791 - DNA, 20 bp, Homo sapiens
tggaaggatcacttgagcct

SEQ ID NO: 1792 - DNA, 20 bp, Homo sapiens
tcccaggaggctgaggtgga

SEQ ID NO: 1793 - DNA, 20 bp, Homo sapiens
ctggtcccaggaggctgagg

SEQ ID NO: 1794 - DNA, 20 bp, Homo sapiens
cctctggtcccaggaggctg

SEQ ID NO: 1795 - DNA, 20 bp, Homo sapiens
atccttccacctcagcctcc

SEQ ID NO: 1796 - DNA, 20 bp, Homo sapiens
tccttccacctcagcctcct

SEQ ID NO: 1797 - DNA, 20 bp, Homo sapiens
tgcatgcctctggtcccagg

SEQ ID NO: 1798 - DNA, 20 bp, Homo sapiens
tggtgcatgcctctggtccc

SEQ ID NO: 1799 - DNA, 20 bp, Homo sapiens
cctcagcctcctgggaccag

SEQ ID NO: 1800 - DNA, 20 bp, Homo sapiens
ggcatagtggtgcatgcctc

SEQ ID NO: 1801 - DNA, 20 bp, Homo sapiens
aaacaattagctgggcatag

SEQ ID NO: 1802 - DNA, 20 bp, Homo sapiens
aaaaaaaaaaacaattagct

SEQ ID NO: 1803 - DNA, 20 bp, Homo sapiens
aaaaaaaaaaaacaattagc

SEQ ID NO: 1804 - DNA, 20 bp, Homo sapiens
gagttctcactatgttgccc

SEQ ID NO: 1805 - DNA, 20 bp, Homo sapiens
tctcactatgttgcccaggc

SEQ ID NO: 1806 - DNA, 20 bp, Homo sapiens
caggagttctagaccagcct

SEQ ID NO: 1807 - DNA, 20 bp, Homo sapiens
ccaggagttctagaccagcc

SEQ ID NO: 1808 - DNA, 20 bp, Homo sapiens
ccaggctggtctagaactcc

SEQ ID NO: 1809 - DNA, 20 bp, Homo sapiens
cagcagaattgctggaagcc

SEQ ID NO: 1810 - DNA, 20 bp, Homo sapiens
ggctgagccagcagaattgc

SEQ ID NO: 1811 - DNA, 20 bp, Homo sapiens
ctggcttccagcaattctgc

SEQ ID NO: 1812 - DNA, 20 bp, Homo sapiens
tataatcccaggactttggg

SEQ ID NO: 1813 - DNA, 20 bp, Homo sapiens
gcctataatcccaggacttt

SEQ ID NO: 1814 - DNA, 20 bp, Homo sapiens
ggctcagcctcccaaagtcc

SEQ ID NO: 1815 - DNA, 20 bp, Homo sapiens
tgcctataatcccaggactt

SEQ ID NO: 1816 - DNA, 20 bp, Homo sapiens
gctcagcctcccaaagtcct

SEQ ID NO: 1817 - DNA, 20 bp, Homo sapiens
tggctcgtgcctataatccc

SEQ ID NO: 1818 - DNA, 20 bp, Homo sapiens
tcccaaagtcctgggattat

SEQ ID NO: 1819 - DNA, 20 bp, Homo sapiens
tattttgaggacaggcatcg

SEQ ID NO: 1820 - DNA, 20 bp, Homo sapiens
cagtaaaatattttgaggac

SEQ ID NO: 1821 - DNA, 20 bp, Homo sapiens
cagtacagtaaaatattttg

SEQ ID NO: 1822 - DNA, 20 bp, Homo sapiens
gtactgtactcacctattat

SEQ ID NO: 1823 - DNA, 20 bp, Homo sapiens
gtcaaccaaaggccaataat

SEQ ID NO: 1824 - DNA, 20 bp, Homo sapiens
actcacctattattggcctt

SEQ ID NO: 1825 - DNA, 20 bp, Homo sapiens
agttacccatggtcaaccaa

SEQ ID NO: 1826 - DNA, 20 bp, Homo sapiens
tattggcctttggttgacca

SEQ ID NO: 1827 - DNA, 20 bp, Homo sapiens
attggcctttggttgaccat

SEQ ID NO: 1828 - DNA, 20 bp, Homo sapiens
gctggagtttcagttaccca

SEQ ID NO: 1829 - DNA, 20 bp, Homo sapiens
ttatccacaccttcgcttgc

SEQ ID NO: 1830 - DNA, 20 bp, Homo sapiens
actgaaactccagcaagcga

SEQ ID NO: 1831 - DNA, 20 bp, Homo sapiens
aactccagcaagcgaaggtg

SEQ ID NO: 1832 - DNA, 20 bp, Homo sapiens
agcaagcgaaggtgtggata

SEQ ID NO: 1833 - DNA, 20 bp, Homo sapiens
gcaagcgaaggtgtggataa

SEQ ID NO: 1834 - DNA, 20 bp, Homo sapiens
ggaaacaatcattgtcttta

SEQ ID NO: 1835 - DNA, 20 bp, Homo sapiens
tgtctcagaggctcatgttc

SEQ ID NO: 1836 - DNA, 20 bp, Homo sapiens
gtatctccctgctgtctcag

SEQ ID NO: 1837 - DNA, 20 bp, Homo sapiens
acatgagcctctgagacagc

SEQ ID NO: 1838 - DNA, 20 bp, Homo sapiens
catgagcctctgagacagca

SEQ ID NO: 1839 - DNA, 20 bp, Homo sapiens
tgagacagcagggagatact

SEQ ID NO: 1840 - DNA, 20 bp, Homo sapiens
gagacagcagggagatacta

SEQ ID NO: 1841 - DNA, 20 bp, Homo sapiens
agacagcagggagatactag

SEQ ID NO: 1842 - DNA, 20 bp, Homo sapiens
agggagatactaggggaagt

SEQ ID NO: 1843 - DNA, 20 bp, Homo sapiens
gagatactaggggaagttgg

SEQ ID NO: 1844 - DNA, 20 bp, Homo sapiens
aagttggtggctcctctccc

SEQ ID NO: 1845 - DNA, 20 bp, Homo sapiens
gaccagttcctgccagggag

SEQ ID NO: 1846 - DNA, 20 bp, Homo sapiens
tggtggctcctctccctggc

SEQ ID NO: 1847 - DNA, 20 bp, Homo sapiens
gcccagaccagttcctgcca

SEQ ID NO: 1848 - DNA, 20 bp, Homo sapiens
agcccagaccagttcctgcc

SEQ ID NO: 1849 - DNA, 20 bp, Homo sapiens
ctcctctccctggcaggaac

SEQ ID NO: 1850 - DNA, 20 bp, Homo sapiens
ctccctggcaggaactggtc

SEQ ID NO: 1851 - DNA, 20 bp, Homo sapiens
tccctggcaggaactggtct

SEQ ID NO: 1852 - DNA, 20 bp, Homo sapiens
caggaactggtctgggctcc

SEQ ID NO: 1853 - DNA, 20 bp, Homo sapiens
cctcatggccaggctgagcc

SEQ ID NO: 1854 - DNA, 20 bp, Homo sapiens
tctgggctcctggctcagcc

SEQ ID NO: 1855 - DNA, 20 bp, Homo sapiens
gccaggacagcctcatggcc

SEQ ID NO: 1856 - DNA, 20 bp, Homo sapiens
cctggctcagcctggccatg

SEQ ID NO: 1857 - DNA, 20 bp, Homo sapiens
gggaggccaggacagcctca

SEQ ID NO: 1858 - DNA, 20 bp, Homo sapiens
gcctggccatgaggctgtcc

SEQ ID NO: 1859 - DNA, 20 bp, Homo sapiens
cgaacccaccgagggaggcc

SEQ ID NO: 1860 - DNA, 20 bp, Homo sapiens
gaggctgtcctggcctccct

SEQ ID NO: 1861 - DNA, 20 bp, Homo sapiens
actgtcgaacccaccgaggg

SEQ ID NO: 1862 - DNA, 20 bp, Homo sapiens
gctgtcctggcctccctcgg

SEQ ID NO: 1863 - DNA, 20 bp, Homo sapiens
ctgtcctggcctccctcggt

SEQ ID NO: 1864 - DNA, 20 bp, Homo sapiens
gtcactgtcgaacccaccga

SEQ ID NO: 1865 - DNA, 20 bp, Homo sapiens
ggtcactgtcgaacccaccg

SEQ ID NO: 1866 - DNA, 20 bp, Homo sapiens
acactgaaatgagcacgtcg

SEQ ID NO: 1867 - DNA, 20 bp, Homo sapiens
tcgacgtgctcatttcagtg

SEQ ID NO: 1868 - DNA, 20 bp, Homo sapiens
catttcagtgtggttcattc

SEQ ID NO: 1869 - DNA, 20 bp, Homo sapiens
acccccttcccctgggagac

SEQ ID NO: 1870 - DNA, 20 bp, Homo sapiens
gtggttcattccggtctccc

SEQ ID NO: 1871 - DNA, 20 bp, Homo sapiens
tggttcattccggtctccca

SEQ ID NO: 1872 - DNA, 20 bp, Homo sapiens
ggttcattccggtctcccag

SEQ ID NO: 1873 - DNA, 20 bp, Homo sapiens
cattccggtctcccagggga

SEQ ID NO: 1874 - DNA, 20 bp, Homo sapiens
actcagcacccccttcccct

SEQ ID NO: 1875 - DNA, 20 bp, Homo sapiens
attccggtctcccaggggaa

SEQ ID NO: 1876 - DNA, 20 bp, Homo sapiens
cactcagcacccccttcccc

SEQ ID NO: 1877 - DNA, 20 bp, Homo sapiens
ttccggtctcccaggggaag

SEQ ID NO: 1878 - DNA, 20 bp, Homo sapiens
tccggtctcccaggggaagg

SEQ ID NO: 1879 - DNA, 20 bp, Homo sapiens
caggggaagggggtgctgag

SEQ ID NO: 1880 - DNA, 20 bp, Homo sapiens
ggaagggggtgctgagtgga

SEQ ID NO: 1881 - DNA, 20 bp, Homo sapiens
agggggtgctgagtggaagg

SEQ ID NO: 1882 - DNA, 20 bp, Homo sapiens
gctgagtggaaggaggtcaa

SEQ ID NO: 1883 - DNA, 20 bp, Homo sapiens
ctgagtggaaggaggtcaat

SEQ ID NO: 1884 - DNA, 20 bp, Homo sapiens
gaaggaggtcaatgggaagc

SEQ ID NO: 1885 - DNA, 20 bp, Homo sapiens
aaggaggtcaatgggaagcc

SEQ ID NO: 1886 - DNA, 20 bp, Homo sapiens
aggaggtcaatgggaagccg

SEQ ID NO: 1887 - DNA, 20 bp, Homo sapiens
aggtcaatgggaagccgggg

SEQ ID NO: 1888 - DNA, 20 bp, Homo sapiens
gcagactctgagagccaccc

SEQ ID NO: 1889 - DNA, 20 bp, Homo sapiens
gggtggctctcagagtctgc

SEQ ID NO: 1890 - DNA, 20 bp, Homo sapiens
tcagagtctgcaggagcagt

SEQ ID NO: 1891 - DNA, 20 bp, Homo sapiens
cagagtctgcaggagcagtc

SEQ ID NO: 1892 - DNA, 20 bp, Homo sapiens
gagcagtcgggctgatgagc

SEQ ID NO: 1893 - DNA, 20 bp, Homo sapiens
agcagtcgggctgatgagct

SEQ ID NO: 1894 - DNA, 20 bp, Homo sapiens
agtcgggctgatgagctggg

SEQ ID NO: 1895 - DNA, 20 bp, Homo sapiens
ccactcagagaagagggagg

SEQ ID NO: 1896 - DNA, 20 bp, Homo sapiens
ctcccactcagagaagaggg

SEQ ID NO: 1897 - DNA, 20 bp, Homo sapiens
ctcctcccactcagagaaga

SEQ ID NO: 1898 - DNA, 20 bp, Homo sapiens
cctcctcccactcagagaag

SEQ ID NO: 1899 - DNA, 20 bp, Homo sapiens
ccgcctccctcttctctgag

SEQ ID NO: 1900 - DNA, 20 bp, Homo sapiens
cgcctccctcttctctgagt

SEQ ID NO: 1901 - DNA, 20 bp, Homo sapiens
ctccctcttctctgagtggg

SEQ ID NO: 1902 - DNA, 20 bp, Homo sapiens
cctcttctctgagtgggagg

SEQ ID NO: 1903 - DNA, 20 bp, Homo sapiens
ctcttctctgagtgggagga

SEQ ID NO: 1904 - DNA, 20 bp, Homo sapiens
agtgggaggagggccagatc

SEQ ID NO: 1905 - DNA, 20 bp, Homo sapiens
ctccaaacccagtccagatc

SEQ ID NO: 1906 - DNA, 20 bp, Homo sapiens
gaggagggccagatctggac

SEQ ID NO: 1907 - DNA, 20 bp, Homo sapiens
aggagggccagatctggact

SEQ ID NO: 1908 - DNA, 20 bp, Homo sapiens
ggccagatctggactgggtt

SEQ ID NO: 1909 - DNA, 20 bp, Homo sapiens
gactgggtttggagatgctc

SEQ ID NO: 1910 - DNA, 20 bp, Homo sapiens
tgggtttggagatgctcagg

SEQ ID NO: 1911 - DNA, 20 bp, Homo sapiens
gggtttggagatgctcaggt

SEQ ID NO: 1912 - DNA, 20 bp, Homo sapiens
ggtttggagatgctcaggtg

SEQ ID NO: 1913 - DNA, 20 bp, Homo sapiens
ggggctcagagcatcacctg

SEQ ID NO: 1914 - DNA, 20 bp, Homo sapiens
gggctcagagcatcacctgt

SEQ ID NO: 1915 - DNA, 20 bp, Homo sapiens
ggctcagagcatcacctgtg

SEQ ID NO: 1916 - DNA, 20 bp, Homo sapiens
agatggtccctctgccccac

SEQ ID NO: 1917 - DNA, 20 bp, Homo sapiens
gagcatcacctgtggggcag

SEQ ID NO: 1918 - DNA, 20 bp, Homo sapiens
agcatcacctgtggggcaga

SEQ ID NO: 1919 - DNA, 20 bp, Homo sapiens
gtggggcagagggaccatct

SEQ ID NO: 1920 - DNA, 20 bp, Homo sapiens
cgggccttcatctgccaaga

SEQ ID NO: 1921 - DNA, 20 bp, Homo sapiens
gggaccatcttggcagatga

SEQ ID NO: 1922 - DNA, 20 bp, Homo sapiens
ggcagatgaaggcccgtcgc

SEQ ID NO: 1923 - DNA, 20 bp, Homo sapiens
gcagatgaaggcccgtcgca

SEQ ID NO: 1924 - DNA, 20 bp, Homo sapiens
caggcatcacaccctgcgac

SEQ ID NO: 1925 - DNA, 20 bp, Homo sapiens
tcaggcatcacaccctgcga

SEQ ID NO: 1926 - DNA, 20 bp, Homo sapiens
cctgtcccgccttgtaattc

SEQ ID NO: 1927 - DNA, 20 bp, Homo sapiens
ggtgtgatgcctgaattaca

SEQ ID NO: 1928 - DNA, 20 bp, Homo sapiens
gtgatgcctgaattacaagg

SEQ ID NO: 1929 - DNA, 20 bp, Homo sapiens
tgatgcctgaattacaaggc

SEQ ID NO: 1930 - DNA, 20 bp, Homo sapiens
cctgaattacaaggcgggac

SEQ ID NO: 1931 - DNA, 20 bp, Homo sapiens
acaaggcgggacaggtaaag

SEQ ID NO: 1932 - DNA, 20 bp, Homo sapiens
caaggcgggacaggtaaagt

SEQ ID NO: 1933 - DNA, 20 bp, Homo sapiens
aaggcgggacaggtaaagtg

SEQ ID NO: 1934 - DNA, 20 bp, Homo sapiens
cgggacaggtaaagtggggc

SEQ ID NO: 1935 - DNA, 20 bp, Homo sapiens
aaagtggggcaggtgagaga

SEQ ID NO: 1936 - DNA, 20 bp, Homo sapiens
gtggggcaggtgagagaagg

SEQ ID NO: 1937 - DNA, 20 bp, Homo sapiens
tggggcaggtgagagaagga

SEQ ID NO: 1938 - DNA, 20 bp, Homo sapiens
ttttggttttcctggaaaac

SEQ ID NO: 1939 - DNA, 20 bp, Homo sapiens
tttttctactcctgttttcc

SEQ ID NO: 1940 - DNA, 20 bp, Homo sapiens
gcgtggcattttggttttcc

SEQ ID NO: 1941 - DNA, 20 bp, Homo sapiens
ggtcgaagtgcgtggcattt

SEQ ID NO: 1942 - DNA, 20 bp, Homo sapiens
ggatcataggtcgaagtgcg

SEQ ID NO: 1943 - DNA, 20 bp, Homo sapiens
attattaggaaaaggatcat

SEQ ID NO: 1944 - DNA, 20 bp, Homo sapiens
agacaagcattattaggaaa

SEQ ID NO: 1945 - DNA, 20 bp, Homo sapiens
agaccaagacaagcattatt

SEQ ID NO: 1946 - DNA, 20 bp, Homo sapiens
tttcctaataatgcttgtct

SEQ ID NO: 1947 - DNA, 20 bp, Homo sapiens
atgcttgtcttggtcttgtt

SEQ ID NO: 1948 - DNA, 20 bp, Homo sapiens
tgcttgtcttggtcttgttt

SEQ ID NO: 1949 - DNA, 20 bp, Homo sapiens
taagacacatttgaccatcg

SEQ ID NO: 1950 - DNA, 20 bp, Homo sapiens
ccaaaccaggccagcctcga

SEQ ID NO: 1951 - DNA, 20 bp, Homo sapiens
acacatttgaccatcgaggc

SEQ ID NO: 1952 - DNA, 20 bp, Homo sapiens
tttgaccatcgaggctggcc

SEQ ID NO: 1953 - DNA, 20 bp, Homo sapiens
ccatcgaggctggcctggtt

SEQ ID NO: 1954 - DNA, 20 bp, Homo sapiens
catcgaggctggcctggttt

SEQ ID NO: 1955 - DNA, 20 bp, Homo sapiens
atcgaggctggcctggtttg

SEQ ID NO: 1956 - DNA, 20 bp, Homo sapiens
tggtcacttctccccaaacc

SEQ ID NO: 1957 - DNA, 20 bp, Homo sapiens
atgggtctgattggctgctg

SEQ ID NO: 1958 - DNA, 20 bp, Homo sapiens
ggaggccccatgggtctgat

SEQ ID NO: 1959 - DNA, 20 bp, Homo sapiens
acagcagccaatcagaccca

SEQ ID NO: 1960 - DNA, 20 bp, Homo sapiens
cagcagccaatcagacccat

SEQ ID NO: 1961 - DNA, 20 bp, Homo sapiens
agcagccaatcagacccatg

SEQ ID NO: 1962 - DNA, 20 bp, Homo sapiens
ggagctcagggaggccccat

SEQ ID NO: 1963 - DNA, 20 bp, Homo sapiens
gggagctcagggaggcccca

SEQ ID NO: 1964 - DNA, 20 bp, Homo sapiens
gatacttggggagctcaggg

SEQ ID NO: 1965 - DNA, 20 bp, Homo sapiens
tgtgatacttggggagctca

SEQ ID NO: 1966 - DNA, 20 bp, Homo sapiens
ctgtgatacttggggagctc

SEQ ID NO: 1967 - DNA, 20 bp, Homo sapiens
cctgataactgtgatacttg

SEQ ID NO: 1968 - DNA, 20 bp, Homo sapiens
ccctgataactgtgatactt

SEQ ID NO: 1969 - DNA, 20 bp, Homo sapiens
accctgataactgtgatact

SEQ ID NO: 1970 - DNA, 20 bp, Homo sapiens
ccccaagtatcacagttatc

SEQ ID NO: 1971 - DNA, 20 bp, Homo sapiens
cccaagtatcacagttatca

SEQ ID NO: 1972 - DNA, 20 bp, Homo sapiens
tcacagttatcagggtccta

SEQ ID NO: 1973 - DNA, 20 bp, Homo sapiens
cgcaggcaataactgtcctt

SEQ ID NO: 1974 - DNA, 20 bp, Homo sapiens
cctccgccagagctggacgc

SEQ ID NO: 1975 - DNA, 20 bp, Homo sapiens
ttattgcctgcgtccagctc

SEQ ID NO: 1976 - DNA, 20 bp, Homo sapiens
agcacaccctccgccagagc

SEQ ID NO: 1977 - DNA, 20 bp, Homo sapiens
ttgcctgcgtccagctctgg

SEQ ID NO: 1978 - DNA, 20 bp, Homo sapiens
cctgcgtccagctctggcgg

SEQ ID NO: 1979 - DNA, 20 bp, Homo sapiens
ctgcgtccagctctggcgga

SEQ ID NO: 1980 - DNA, 20 bp, Homo sapiens
cccaggtgaggctaaaataa

SEQ ID NO: 1981 - DNA, 20 bp, Homo sapiens
gcccaggtgaggctaaaata

SEQ ID NO: 1982 - DNA, 20 bp, Homo sapiens
tcccttattttagcctcacc

SEQ ID NO: 1983 - DNA, 20 bp, Homo sapiens
cccttattttagcctcacct

SEQ ID NO: 1984 - DNA, 20 bp, Homo sapiens
atgagcctgttgcccaggtg

SEQ ID NO: 1985 - DNA, 20 bp, Homo sapiens
gtgagatgagcctgttgccc

SEQ ID NO: 1986 - DNA, 20 bp, Homo sapiens
tttagcctcacctgggcaac

SEQ ID NO: 1987 - DNA, 20 bp, Homo sapiens
cacttaggaaaattttaaat

SEQ ID NO: 1988 - DNA, 20 bp, Homo sapiens
acacttaggaaaattttaaa

SEQ ID NO: 1989 - DNA, 20 bp, Homo sapiens
atttaaaattttcctaagtg

SEQ ID NO: 1990 - DNA, 20 bp, Homo sapiens
cagccccagactccacactt

SEQ ID NO: 1991 - DNA, 20 bp, Homo sapiens
attttcctaagtgtggagtc

SEQ ID NO: 1992 - DNA, 20 bp, Homo sapiens
ttttcctaagtgtggagtct

SEQ ID NO: 1993 - DNA, 20 bp, Homo sapiens
tttcctaagtgtggagtctg

SEQ ID NO: 1994 - DNA, 20 bp, Homo sapiens
ctaagtgtggagtctggggc

SEQ ID NO: 1995 - DNA, 20 bp, Homo sapiens
taagtgtggagtctggggct

SEQ ID NO: 1996 - DNA, 20 bp, Homo sapiens
gccacgcaattgtgggcaag

SEQ ID NO: 1997 - DNA, 20 bp, Homo sapiens
agccacgcaattgtgggcaa

SEQ ID NO: 1998 - DNA, 20 bp, Homo sapiens
cagccacgcaattgtgggca

SEQ ID NO: 1999 - DNA, 20 bp, Homo sapiens
acccccagccacgcaattgt

SEQ ID NO: 2000 - DNA, 20 bp, Homo sapiens
cacccccagccacgcaattg

SEQ ID NO: 2001 - DNA, 20 bp, Homo sapiens
gccccttgcccacaattgcg

SEQ ID NO: 2002 - DNA, 20 bp, Homo sapiens
cttgcccacaattgcgtggc

SEQ ID NO: 2003 - DNA, 20 bp, Homo sapiens
ttgcccacaattgcgtggct

SEQ ID NO: 2004 - DNA, 20 bp, Homo sapiens
tgcccacaattgcgtggctg

SEQ ID NO: 2005 - DNA, 20 bp, Homo sapiens
gcccacaattgcgtggctgg

SEQ ID NO: 2006 - DNA, 20 bp, Homo sapiens
cacaattgcgtggctggggg

SEQ ID NO: 2007 - DNA, 20 bp, Homo sapiens
acaattgcgtggctgggggt

SEQ ID NO: 2008 - DNA, 20 bp, Homo sapiens
caattgcgtggctgggggtg

SEQ ID NO: 2009 - DNA, 20 bp, Homo sapiens
tgcgtggctgggggtgggga

SEQ ID NO: 2010 - DNA, 20 bp, Homo sapiens
gggggtggggaaggcaattc

SEQ ID NO: 2011 - DNA, 20 bp, Homo sapiens
ggggtggggaaggcaattct

SEQ ID NO: 2012 - DNA, 20 bp, Homo sapiens
ctggaagcgactaacagctt

SEQ ID NO: 2013 - DNA, 20 bp, Homo sapiens
tctggaagcgactaacagct

SEQ ID NO: 2014 - DNA, 20 bp, Homo sapiens
gttctgggaccttctgtgtc

SEQ ID NO: 2015 - DNA, 20 bp, Homo sapiens
tagtcgcttccagacacaga

SEQ ID NO: 2016 - DNA, 20 bp, Homo sapiens
gtgacttcactcttggttct

SEQ ID NO: 2017 - DNA, 20 bp, Homo sapiens
ggtgacttcactcttggttc

SEQ ID NO: 2018 - DNA, 20 bp, Homo sapiens
gtgacaggtgacttcactct

SEQ ID NO: 2019 - DNA, 20 bp, Homo sapiens
gatgccccagtagaggtgac

SEQ ID NO: 2020 - DNA, 20 bp, Homo sapiens
aagtcacctgtcacctctac

SEQ ID NO: 2021 - DNA, 20 bp, Homo sapiens
agtcacctgtcacctctact

SEQ ID NO: 2022 - DNA, 20 bp, Homo sapiens
gtcacctgtcacctctactg

SEQ ID NO: 2023 - DNA, 20 bp, Homo sapiens
gtccagagatgccccagtag

SEQ ID NO: 2024 - DNA, 20 bp, Homo sapiens
cacctctactggggcatctc

SEQ ID NO: 2025 - DNA, 20 bp, Homo sapiens
tactggggcatctctggaca

SEQ ID NO: 2026 - DNA, 20 bp, Homo sapiens
gggcatctctggacacggtc

SEQ ID NO: 2027 - DNA, 20 bp, Homo sapiens
tctggaaacactccctgacg

SEQ ID NO: 2028 - DNA, 20 bp, Homo sapiens
cagtccctgaggccacgtca

SEQ ID NO: 2029 - DNA, 20 bp, Homo sapiens
gcagtccctgaggccacgtc

SEQ ID NO: 2030 - DNA, 20 bp, Homo sapiens
acactccctgacgtggcctc

SEQ ID NO: 2031 - DNA, 20 bp, Homo sapiens
cactccctgacgtggcctca

SEQ ID NO: 2032 - DNA, 20 bp, Homo sapiens
cttggtcagtgcagtccctg

SEQ ID NO: 2033 - DNA, 20 bp, Homo sapiens
ctcagggactgcactgacca

SEQ ID NO: 2034 - DNA, 20 bp, Homo sapiens
gactgcactgaccaaggcac

SEQ ID NO: 2035 - DNA, 20 bp, Homo sapiens
accccccgccaccagtgcct

SEQ ID NO: 2036 - DNA, 20 bp, Homo sapiens
tgcactgaccaaggcactgg

SEQ ID NO: 2037 - DNA, 20 bp, Homo sapiens
actgaccaaggcactggtgg

SEQ ID NO: 2038 - DNA, 20 bp, Homo sapiens
ctgaccaaggcactggtggc

SEQ ID NO: 2039 - DNA, 20 bp, Homo sapiens
tgaccaaggcactggtggcg

SEQ ID NO: 2040 - DNA, 20 bp, Homo sapiens
gaccaaggcactggtggcgg

SEQ ID NO: 2041 - DNA, 20 bp, Homo sapiens
accaaggcactggtggcggg

SEQ ID NO: 2042 - DNA, 20 bp, Homo sapiens
ggcactggtggcggggggtg

SEQ ID NO: 2043 - DNA, 20 bp, Homo sapiens
gcactggtggcggggggtga

SEQ ID NO: 2044 - DNA, 20 bp, Homo sapiens
gtggcggggggtgagggagc

SEQ ID NO: 2045 - DNA, 20 bp, Homo sapiens
tggcggggggtgagggagct

SEQ ID NO: 2046 - DNA, 20 bp, Homo sapiens
ggcggggggtgagggagctg

SEQ ID NO: 2047 - DNA, 20 bp, Homo sapiens
gggtgagggagctggggctc

SEQ ID NO: 2048 - DNA, 20 bp, Homo sapiens
tggggctctggagctccagc

SEQ ID NO: 2049 - DNA, 20 bp, Homo sapiens
gctcacgtatgggcacctgc

SEQ ID NO: 2050 - DNA, 20 bp, Homo sapiens
ctgggatattgctcacgtat

SEQ ID NO: 2051 - DNA, 20 bp, Homo sapiens
cctgggatattgctcacgta

SEQ ID NO: 2052 - DNA, 20 bp, Homo sapiens
ccatacgtgagcaatatccc

SEQ ID NO: 2053 - DNA, 20 bp, Homo sapiens
catacgtgagcaatatccca

SEQ ID NO: 2054 - DNA, 20 bp, Homo sapiens
tgggcaggagggtggtccct

SEQ ID NO: 2055 - DNA, 20 bp, Homo sapiens
gtgggcaggagggtggtccc

SEQ ID NO: 2056 - DNA, 20 bp, Homo sapiens
ccgggaggtgggcaggaggg

SEQ ID NO: 2057 - DNA, 20 bp, Homo sapiens
acaccgggaggtgggcagga

SEQ ID NO: 2058 - DNA, 20 bp, Homo sapiens
cacaccgggaggtgggcagg

SEQ ID NO: 2059 - DNA, 20 bp, Homo sapiens
tcccacaccgggaggtgggc

SEQ ID NO: 2060 - DNA, 20 bp, Homo sapiens
ccaccctcctgcccacctcc

SEQ ID NO: 2061 - DNA, 20 bp, Homo sapiens
cacgtcccacaccgggaggt

SEQ ID NO: 2062 - DNA, 20 bp, Homo sapiens
ccacgtcccacaccgggagg

SEQ ID NO: 2063 - DNA, 20 bp, Homo sapiens
tcgccacgtcccacaccggg

SEQ ID NO: 2064 - DNA, 20 bp, Homo sapiens
ctcctgcccacctcccggtg

SEQ ID NO: 2065 - DNA, 20 bp, Homo sapiens
tcctgcccacctcccggtgt

SEQ ID NO: 2066 - DNA, 20 bp, Homo sapiens
gcctcgccacgtcccacacc

SEQ ID NO: 2067 - DNA, 20 bp, Homo sapiens
cgcctcgccacgtcccacac

SEQ ID NO: 2068 - DNA, 20 bp, Homo sapiens
ccacctcccggtgtgggacg

SEQ ID NO: 2069 - DNA, 20 bp, Homo sapiens
tcccggtgtgggacgtggcg

SEQ ID NO: 2070 - DNA, 20 bp, Homo sapiens
gcaagttctcagcaaagctc

SEQ ID NO: 2071 - DNA, 20 bp, Homo sapiens
gcaaggcctcgaggcaggta

SEQ ID NO: 2072 - DNA, 20 bp, Homo sapiens
tgcaaggcctcgaggcaggt

SEQ ID NO: 2073 - DNA, 20 bp, Homo sapiens
aacttgccctacctgcctcg

SEQ ID NO: 2074 - DNA, 20 bp, Homo sapiens
aagctgcaaggcctcgaggc

SEQ ID NO: 2075 - DNA, 20 bp, Homo sapiens
ggtgaagctgcaaggcctcg

SEQ ID NO: 2076 - DNA, 20 bp, Homo sapiens
gagttcccggtgaagctgca

SEQ ID NO: 2077 - DNA, 20 bp, Homo sapiens
tcgaggccttgcagcttcac

SEQ ID NO: 2078 - DNA, 20 bp, Homo sapiens
cgaggccttgcagcttcacc

SEQ ID NO: 2079 - DNA, 20 bp, Homo sapiens
agcgtgagcacaagagttcc

SEQ ID NO: 2080 - DNA, 20 bp, Homo sapiens
aactcttgtgctcacgctgc

SEQ ID NO: 2081 - DNA, 20 bp, Homo sapiens
cctccaaaaagtgcatggtg

SEQ ID NO: 2082 - DNA, 20 bp, Homo sapiens
cccttcctccaaaaagtgca

SEQ ID NO: 2083 - DNA, 20 bp, Homo sapiens
tggccgcaccatgcactttt

SEQ ID NO: 2084 - DNA, 20 bp, Homo sapiens
ccgcaccatgcactttttgg

SEQ ID NO: 2085 - DNA, 20 bp, Homo sapiens
accatgcactttttggagga

SEQ ID NO: 2086 - DNA, 20 bp, Homo sapiens
ccatgcactttttggaggaa

SEQ ID NO: 2087 - DNA, 20 bp, Homo sapiens
ttttggaggaagggaccaac

SEQ ID NO: 2088 - DNA, 20 bp, Homo sapiens
acagaacgaagactgcctgt

SEQ ID NO: 2089 - DNA, 20 bp, Homo sapiens
tcgttctgtgtcctgagtct

SEQ ID NO: 2090 - DNA, 20 bp, Homo sapiens
aaggaagtgtgccaagactc

SEQ ID NO: 2091 - DNA, 20 bp, Homo sapiens
aggaccccgtaactgcagaa

SEQ ID NO: 2092 - DNA, 20 bp, Homo sapiens
acacttcctttctgcagtta

SEQ ID NO: 2093 - DNA, 20 bp, Homo sapiens
cacttcctttctgcagttac

SEQ ID NO: 2094 - DNA, 20 bp, Homo sapiens
acttcctttctgcagttacg

SEQ ID NO: 2095 - DNA, 20 bp, Homo sapiens
gcattagacttctggggctt

SEQ ID NO: 2096 - DNA, 20 bp, Homo sapiens
ttcctggcattagacttctg

SEQ ID NO: 2097 - DNA, 20 bp, Homo sapiens
cttcctggcattagacttct

SEQ ID NO: 2098 - DNA, 20 bp, Homo sapiens
gcttcctggcattagacttc

SEQ ID NO: 2099 - DNA, 20 bp, Homo sapiens
agccccagaagtctaatgcc

SEQ ID NO: 2100 - DNA, 20 bp, Homo sapiens
aacccccgttccaggcttcc

SEQ ID NO: 2101 - DNA, 20 bp, Homo sapiens
aagtctaatgccaggaagcc

SEQ ID NO: 2102 - DNA, 20 bp, Homo sapiens
taatgccaggaagcctggaa

SEQ ID NO: 2103 - DNA, 20 bp, Homo sapiens
aatgccaggaagcctggaac

SEQ ID NO: 2104 - DNA, 20 bp, Homo sapiens
atgccaggaagcctggaacg

SEQ ID NO: 2105 - DNA, 20 bp, Homo sapiens
ctcaccagaacccccgttcc

SEQ ID NO: 2106 - DNA, 20 bp, Homo sapiens
tgccaggaagcctggaacgg

SEQ ID NO: 2107 - DNA, 20 bp, Homo sapiens
gaagcctggaacgggggttc

SEQ ID NO: 2108 - DNA, 20 bp, Homo sapiens
acgggggttctggtgagtgc

SEQ ID NO: 2109 - DNA, 20 bp, Homo sapiens
cgggggttctggtgagtgca

SEQ ID NO: 2110 - DNA, 20 bp, Homo sapiens
tggtgagtgcagggaagagc

SEQ ID NO: 2111 - DNA, 20 bp, Homo sapiens
tgagtgcagggaagagcagg

SEQ ID NO: 2112 - DNA, 20 bp, Homo sapiens
agcaggtggagcatccatgc

SEQ ID NO: 2113 - DNA, 20 bp, Homo sapiens
agccagcaccccggccagca

SEQ ID NO: 2114 - DNA, 20 bp, Homo sapiens
ggtggagcatccatgctggc

SEQ ID NO: 2115 - DNA, 20 bp, Homo sapiens
gtggagcatccatgctggcc

SEQ ID NO: 2116 - DNA, 20 bp, Homo sapiens
tggagcatccatgctggccg

SEQ ID NO: 2117 - DNA, 20 bp, Homo sapiens
atccatgctggccggggtgc

SEQ ID NO: 2118 - DNA, 20 bp, Homo sapiens
cccgcccacagccagcaccc

SEQ ID NO: 2119 - DNA, 20 bp, Homo sapiens
gctggccggggtgctggctg

SEQ ID NO: 2120 - DNA, 20 bp, Homo sapiens
ctggccggggtgctggctgt

SEQ ID NO: 2121 - DNA, 20 bp, Homo sapiens
gccggggtgctggctgtggg

SEQ ID NO: 2122 - DNA, 20 bp, Homo sapiens
ccggggtgctggctgtgggc

SEQ ID NO: 2123 - DNA, 20 bp, Homo sapiens
cggggtgctggctgtgggcg

SEQ ID NO: 2124 - DNA, 20 bp, Homo sapiens
ggggtgctggctgtgggcgg

SEQ ID NO: 2125 - DNA, 20 bp, Homo sapiens
tgtgggcgggggtcccactc

SEQ ID NO: 2126 - DNA, 20 bp, Homo sapiens
gtgggcgggggtcccactct

SEQ ID NO: 2127 - DNA, 20 bp, Homo sapiens
ggagggggagttcccagagt

SEQ ID NO: 2128 - DNA, 20 bp, Homo sapiens
gggagggggagttcccagag

SEQ ID NO: 2129 - DNA, 20 bp, Homo sapiens
gcgggcccaggaaggggagg

SEQ ID NO: 2130 - DNA, 20 bp, Homo sapiens
agcgggcccaggaaggggag

SEQ ID NO: 2131 - DNA, 20 bp, Homo sapiens
gagcgggcccaggaagggga

SEQ ID NO: 2132 - DNA, 20 bp, Homo sapiens
agagcgggcccaggaagggg

SEQ ID NO: 2133 - DNA, 20 bp, Homo sapiens
ggaactccccctccccttcc

SEQ ID NO: 2134 - DNA, 20 bp, Homo sapiens
gaactccccctccccttcct

SEQ ID NO: 2135 - DNA, 20 bp, Homo sapiens
tagagagcgggcccaggaag

SEQ ID NO: 2136 - DNA, 20 bp, Homo sapiens
atagagagcgggcccaggaa

SEQ ID NO: 2137 - DNA, 20 bp, Homo sapiens
catagagagcgggcccagga

SEQ ID NO: 2138 - DNA, 20 bp, Homo sapiens
agagcatagagagcgggccc

SEQ ID NO: 2139 - DNA, 20 bp, Homo sapiens
ctgggcagagcatagagagc

SEQ ID NO: 2140 - DNA, 20 bp, Homo sapiens
actgggcagagcatagagag

SEQ ID NO: 2141 - DNA, 20 bp, Homo sapiens
gagttgagcatgtctacact

SEQ ID NO: 2142 - DNA, 20 bp, Homo sapiens
agagttgagcatgtctacac

SEQ ID NO: 2143 - DNA, 20 bp, Homo sapiens
tgtagacatgctcaactctg

SEQ ID NO: 2144 - DNA, 20 bp, Homo sapiens
gctcaactctgtggccttga

SEQ ID NO: 2145 - DNA, 20 bp, Homo sapiens
ctcaactctgtggccttgaa

SEQ ID NO: 2146 - DNA, 20 bp, Homo sapiens
ggtatccaggtgacccttca

SEQ ID NO: 2147 - DNA, 20 bp, Homo sapiens
tgtggccttgaagggtcacc

SEQ ID NO: 2148 - DNA, 20 bp, Homo sapiens
ggctgactccagaggtatcc

SEQ ID NO: 2149 - DNA, 20 bp, Homo sapiens
aagggtcacctggatacctc

SEQ ID NO: 2150 - DNA, 20 bp, Homo sapiens
gaggtcaaggctgactccag

SEQ ID NO: 2151 - DNA, 20 bp, Homo sapiens
ggaggtcagaagggaggtca

SEQ ID NO: 2152 - DNA, 20 bp, Homo sapiens
gggactggaggtcagaaggg

SEQ ID NO: 2153 - DNA, 20 bp, Homo sapiens
ttggggactggaggtcagaa

SEQ ID NO: 2154 - DNA, 20 bp, Homo sapiens
gttggggactggaggtcaga

SEQ ID NO: 2155 - DNA, 20 bp, Homo sapiens
agcctggagttggggactgg

SEQ ID NO: 2156 - DNA, 20 bp, Homo sapiens
gtaagcctggagttggggac

SEQ ID NO: 2157 - DNA, 20 bp, Homo sapiens
tctgggtaagcctggagttg

SEQ ID NO: 2158 - DNA, 20 bp, Homo sapiens
gacctccagtccccaactcc

SEQ ID NO: 2159 - DNA, 20 bp, Homo sapiens
ctctgggtaagcctggagtt

SEQ ID NO: 2160 - DNA, 20 bp, Homo sapiens
actctgggtaagcctggagt

SEQ ID NO: 2161 - DNA, 20 bp, Homo sapiens
atgggaactctgggtaagcc

SEQ ID NO: 2162 - DNA, 20 bp, Homo sapiens
agaccatgcatgggaactct

SEQ ID NO: 2163 - DNA, 20 bp, Homo sapiens
gagaccatgcatgggaactc

SEQ ID NO: 2164 - DNA, 20 bp, Homo sapiens
ttacccagagttcccatgca

SEQ ID NO: 2165 - DNA, 20 bp, Homo sapiens
ggggagcagagaccatgcat

SEQ ID NO: 2166 - DNA, 20 bp, Homo sapiens
gggggagcagagaccatgca

SEQ ID NO: 2167 - DNA, 20 bp, Homo sapiens
tggaggaggggtggggatgg

SEQ ID NO: 2168 - DNA, 20 bp, Homo sapiens
gtggaggaggggtggggatg

SEQ ID NO: 2169 - DNA, 20 bp, Homo sapiens
ggtggaggaggggtggggat

SEQ ID NO: 2170 - DNA, 20 bp, Homo sapiens
tggtggaggaggggtgggga

SEQ ID NO: 2171 - DNA, 20 bp, Homo sapiens
tggctggtggaggaggggtg

SEQ ID NO: 2172 - DNA, 20 bp, Homo sapiens
atggctggtggaggaggggt

SEQ ID NO: 2173 - DNA, 20 bp, Homo sapiens
gatggctggtggaggagggg

SEQ ID NO: 2174 - DNA, 20 bp, Homo sapiens
gaggatggctggtggaggag

SEQ ID NO: 2175 - DNA, 20 bp, Homo sapiens
tgaggatggctggtggagga

SEQ ID NO: 2176 - DNA, 20 bp, Homo sapiens
ttgaggatggctggtggagg

SEQ ID NO: 2177 - DNA, 20 bp, Homo sapiens
gagttgaggatggctggtgg

SEQ ID NO: 2178 - DNA, 20 bp, Homo sapiens
ggagagttgaggatggctgg

SEQ ID NO: 2179 - DNA, 20 bp, Homo sapiens
aagggagagttgaggatggc

SEQ ID NO: 2180 - DNA, 20 bp, Homo sapiens
agcaaagggagagttgagga

SEQ ID NO: 2181 - DNA, 20 bp, Homo sapiens
tgagagcaaagggagagttg

SEQ ID NO: 2182 - DNA, 20 bp, Homo sapiens
agtgtaggggtgagagcaaa

SEQ ID NO: 2183 - DNA, 20 bp, Homo sapiens
cagtgtaggggtgagagcaa

SEQ ID NO: 2184 - DNA, 20 bp, Homo sapiens
ctttgctctcacccctacac

SEQ ID NO: 2185 - DNA, 20 bp, Homo sapiens
gatttgggaacccagtgtag

SEQ ID NO: 2186 - DNA, 20 bp, Homo sapiens
tttgctctcacccctacact

SEQ ID NO: 2187 - DNA, 20 bp, Homo sapiens
ggatttgggaacccagtgta

SEQ ID NO: 2188 - DNA, 20 bp, Homo sapiens
aggatttgggaacccagtgt

SEQ ID NO: 2189 - DNA, 20 bp, Homo sapiens
gagcagggctggcaggattt

SEQ ID NO: 2190 - DNA, 20 bp, Homo sapiens
agagcagggctggcaggatt

SEQ ID NO: 2191 - DNA, 20 bp, Homo sapiens
tgctgaagagcagggctggc

SEQ ID NO: 2192 - DNA, 20 bp, Homo sapiens
gagctgctgaagagcagggc

SEQ ID NO: 2193 - DNA, 20 bp, Homo sapiens
acgcgagctgctgaagagca

SEQ ID NO: 2194 - DNA, 20 bp, Homo sapiens
cacgcgagctgctgaagagc

SEQ ID NO: 2195 - DNA, 20 bp, Homo sapiens
tcagcagctcgcgtgcccac

SEQ ID NO: 2196 - DNA, 20 bp, Homo sapiens
tcgaaggcagggaggccagt

SEQ ID NO: 2197 - DNA, 20 bp, Homo sapiens
gtcgaaggcagggaggccag

SEQ ID NO: 2198 - DNA, 20 bp, Homo sapiens
gcaggacgtcgaaggcaggg

SEQ ID NO: 2199 - DNA, 20 bp, Homo sapiens
ggagcaggacgtcgaaggca

SEQ ID NO: 2200 - DNA, 20 bp, Homo sapiens
tggagcaggacgtcgaaggc

SEQ ID NO: 2201 - DNA, 20 bp, Homo sapiens
gccctggagcaggacgtcga

SEQ ID NO: 2202 - DNA, 20 bp, Homo sapiens
tgccttcgacgtcctgctcc

SEQ ID NO: 2203 - DNA, 20 bp, Homo sapiens
gccttcgacgtcctgctcca

SEQ ID NO: 2204 - DNA, 20 bp, Homo sapiens
ccccaccggagccctggagc

SEQ ID NO: 2205 - DNA, 20 bp, Homo sapiens
gacgtcctgctccagggctc

SEQ ID NO: 2206 - DNA, 20 bp, Homo sapiens
gggcagccccaccggagccc

SEQ ID NO: 2207 - DNA, 20 bp, Homo sapiens
gtcctgctccagggctccgg

SEQ ID NO: 2208 - DNA, 20 bp, Homo sapiens
tcctgctccagggctccggt

SEQ ID NO: 2209 - DNA, 20 bp, Homo sapiens
cctgctccagggctccggtg

SEQ ID NO: 2210 - DNA, 20 bp, Homo sapiens
agagatgagggcagccccac

SEQ ID NO: 2211 - DNA, 20 bp, Homo sapiens
tgaggctgtcacagagatga

SEQ ID NO: 2212 - DNA, 20 bp, Homo sapiens
ctgaggctgtcacagagatg

SEQ ID NO: 2213 - DNA, 20 bp, Homo sapiens
gggatggggagacaagtctg

SEQ ID NO: 2214 - DNA, 20 bp, Homo sapiens
ggacagggctgatggggatg

SEQ ID NO: 2215 - DNA, 20 bp, Homo sapiens
gggacagggctgatggggat

SEQ ID NO: 2216 - DNA, 20 bp, Homo sapiens
ggggacagggctgatgggga

SEQ ID NO: 2217 - DNA, 20 bp, Homo sapiens
gaagggggacagggctgatg

SEQ ID NO: 2218 - DNA, 20 bp, Homo sapiens
agaagggggacagggctgat

SEQ ID NO: 2219 - DNA, 20 bp, Homo sapiens
aagaagggggacagggctga

SEQ ID NO: 2220 - DNA, 20 bp, Homo sapiens
ctgtgagaagaagggggaca

SEQ ID NO: 2221 - DNA, 20 bp, Homo sapiens
gctgtgagaagaagggggac

SEQ ID NO: 2222 - DNA, 20 bp, Homo sapiens
cagctgctgtgagaagaagg

SEQ ID NO: 2223 - DNA, 20 bp, Homo sapiens
ccagctgctgtgagaagaag

SEQ ID NO: 2224 - DNA, 20 bp, Homo sapiens
tccagctgctgtgagaagaa

SEQ ID NO: 2225 - DNA, 20 bp, Homo sapiens
ctccagctgctgtgagaaga

SEQ ID NO: 2226 - DNA, 20 bp, Homo sapiens
ccccttcttctcacagcagc

SEQ ID NO: 2227 - DNA, 20 bp, Homo sapiens
gagcctcctaccttatgttc

SEQ ID NO: 2228 - DNA, 20 bp, Homo sapiens
agtgatctttccagaacata

SEQ ID NO: 2229 - DNA, 20 bp, Homo sapiens
atctttccagaacataaggt

SEQ ID NO: 2230 - DNA, 20 bp, Homo sapiens
tttccagaacataaggtagg

SEQ ID NO: 2231 - DNA, 20 bp, Homo sapiens
aggaaggcaggatcagatca

SEQ ID NO: 2232 - DNA, 20 bp, Homo sapiens
gctggggaggtcaggaaggc

SEQ ID NO: 2233 - DNA, 20 bp, Homo sapiens
tgaggctggggaggtcagga

SEQ ID NO: 2234 - DNA, 20 bp, Homo sapiens
gagatgaggctggggaggtc

SEQ ID NO: 2235 - DNA, 20 bp, Homo sapiens
agggagagatgaggctgggg

SEQ ID NO: 2236 - DNA, 20 bp, Homo sapiens
aggagggagagatgaggctg

SEQ ID NO: 2237 - DNA, 20 bp, Homo sapiens
gaggagggagagatgaggct

SEQ ID NO: 2238 - DNA, 20 bp, Homo sapiens
agaggagggagagatgaggc

SEQ ID NO: 2239 - DNA, 20 bp, Homo sapiens
gggcagaggagggagagatg

SEQ ID NO: 2240 - DNA, 20 bp, Homo sapiens
cagagggcgagggcagagga

SEQ ID NO: 2241 - DNA, 20 bp, Homo sapiens
acagagggcgagggcagagg

SEQ ID NO: 2242 - DNA, 20 bp, Homo sapiens
agcacagagggcgagggcag

SEQ ID NO: 2243 - DNA, 20 bp, Homo sapiens
ggctggagcacagagggcga

SEQ ID NO: 2244 - DNA, 20 bp, Homo sapiens
tggctggagcacagagggcg

SEQ ID NO: 2245 - DNA, 20 bp, Homo sapiens
cacgttggctggagcacaga

SEQ ID NO: 2246 - DNA, 20 bp, Homo sapiens
ccacgttggctggagcacag

SEQ ID NO: 2247 - DNA, 20 bp, Homo sapiens
gagtgacaggccacgttggc

SEQ ID NO: 2248 - DNA, 20 bp, Homo sapiens
cctctgtgctccagccaacg

SEQ ID NO: 2249 - DNA, 20 bp, Homo sapiens
ggacgagtgacaggccacgt

SEQ ID NO: 2250 - DNA, 20 bp, Homo sapiens
atggcaggtggacgagtgac

SEQ ID NO: 2251 - DNA, 20 bp, Homo sapiens
agtcaggacagtatggcagg

SEQ ID NO: 2252 - DNA, 20 bp, Homo sapiens
tggagtcaggacagtatggc

SEQ ID NO: 2253 - DNA, 20 bp, Homo sapiens
ggcctggagtcaggacagta

SEQ ID NO: 2254 - DNA, 20 bp, Homo sapiens
tgccatactgtcctgactcc

SEQ ID NO: 2255 - DNA, 20 bp, Homo sapiens
acaggcaaaggcctggagtc

SEQ ID NO: 2256 - DNA, 20 bp, Homo sapiens
ccatagcacaggcaaaggcc

SEQ ID NO: 2257 - DNA, 20 bp, Homo sapiens
agaggccatagcacaggcaa

SEQ ID NO: 2258 - DNA, 20 bp, Homo sapiens
ccaggcctttgcctgtgcta

SEQ ID NO: 2259 - DNA, 20 bp, Homo sapiens
cccaacagaggccatagcac

SEQ ID NO: 2260 - DNA, 20 bp, Homo sapiens
gcctgtgctatggcctctgt

SEQ ID NO: 2261 - DNA, 20 bp, Homo sapiens
cctgtgctatggcctctgtt

SEQ ID NO: 2262 - DNA, 20 bp, Homo sapiens
gacaagagtggtcccaacag

SEQ ID NO: 2263 - DNA, 20 bp, Homo sapiens
cagcaggggagagacaagag

SEQ ID NO: 2264 - DNA, 20 bp, Homo sapiens
ggaattagcagacacagcag

SEQ ID NO: 2265 - DNA, 20 bp, Homo sapiens
gggaattagcagacacagca

SEQ ID NO: 2266 - DNA, 20 bp, Homo sapiens
tgggaattagcagacacagc

SEQ ID NO: 2267 - DNA, 20 bp, Homo sapiens
catggatcactgacacgagt

SEQ ID NO: 2268 - DNA, 20 bp, Homo sapiens
ccatggatcactgacacgag

SEQ ID NO: 2269 - DNA, 20 bp, Homo sapiens
ccactcgtgtcagtgatcca

SEQ ID NO: 2270 - DNA, 20 bp, Homo sapiens
agtggtgtgttctgcagcca

SEQ ID NO: 2271 - DNA, 20 bp, Homo sapiens
attgttttccatggatggag

SEQ ID NO: 2272 - DNA, 20 bp, Homo sapiens
agaacacaccactccatcca

SEQ ID NO: 2273 - DNA, 20 bp, Homo sapiens
ttgtgattgttttccatgga

SEQ ID NO: 2274 - DNA, 20 bp, Homo sapiens
atgattgtgattgttttcca

SEQ ID NO: 2275 - DNA, 20 bp, Homo sapiens
cattgattactatctctccc

SEQ ID NO: 2276 - DNA, 20 bp, Homo sapiens
attgattactatctctccct

SEQ ID NO: 2277 - DNA, 20 bp, Homo sapiens
agtccaccccaggaagccca

SEQ ID NO: 2278 - DNA, 20 bp, Homo sapiens
cagtccaccccaggaagccc

SEQ ID NO: 2279 - DNA, 20 bp, Homo sapiens
ctatctctccctgggcttcc

SEQ ID NO: 2280 - DNA, 20 bp, Homo sapiens
tatctctccctgggcttcct

SEQ ID NO: 2281 - DNA, 20 bp, Homo sapiens
atctctccctgggcttcctg

SEQ ID NO: 2282 - DNA, 20 bp, Homo sapiens
tctccctgggcttcctgggg

SEQ ID NO: 2283 - DNA, 20 bp, Homo sapiens
agctgagcccagtccacccc

SEQ ID NO: 2284 - DNA, 20 bp, Homo sapiens
ctgggcttcctggggtggac

SEQ ID NO: 2285 - DNA, 20 bp, Homo sapiens
tgggcttcctggggtggact

SEQ ID NO: 2286 - DNA, 20 bp, Homo sapiens
tggggtggactgggctcagc

SEQ ID NO: 2287 - DNA, 20 bp, Homo sapiens
ggggtggactgggctcagct

SEQ ID NO: 2288 - DNA, 20 bp, Homo sapiens
gtggactgggctcagctggg

SEQ ID NO: 2289 - DNA, 20 bp, Homo sapiens
ctcagctgggtggttcactt

SEQ ID NO: 2290 - DNA, 20 bp, Homo sapiens
tcagctgggtggttcacttt

SEQ ID NO: 2291 - DNA, 20 bp, Homo sapiens
cagctgggtggttcactttg

SEQ ID NO: 2292 - DNA, 20 bp, Homo sapiens
ctgtctgcccatgactgctg

SEQ ID NO: 2293 - DNA, 20 bp, Homo sapiens
ctttggggcctcagcagtca

SEQ ID NO: 2294 - DNA, 20 bp, Homo sapiens
tttggggcctcagcagtcat

SEQ ID NO: 2295 - DNA, 20 bp, Homo sapiens
cagcagtcatgggcagacag

SEQ ID NO: 2296 - DNA, 20 bp, Homo sapiens
agtcatgggcagacagtggc

SEQ ID NO: 2297 - DNA, 20 bp, Homo sapiens
gtcatgggcagacagtggct

SEQ ID NO: 2298 - DNA, 20 bp, Homo sapiens
tcatgggcagacagtggctg

SEQ ID NO: 2299 - DNA, 20 bp, Homo sapiens
catcaactgccagagatgca

SEQ ID NO: 2300 - DNA, 20 bp, Homo sapiens
gcatcaactgccagagatgc

SEQ ID NO: 2301 - DNA, 20 bp, Homo sapiens
caaagacttccctgcatctc

SEQ ID NO: 2302 - DNA, 20 bp, Homo sapiens
gcatctctggcagttgatgc

SEQ ID NO: 2303 - DNA, 20 bp, Homo sapiens
gtcatctgagacacctaccc

SEQ ID NO: 2304 - DNA, 20 bp, Homo sapiens
tcatctgagacacctaccca

SEQ ID NO: 2305 - DNA, 20 bp, Homo sapiens
cccagggagaggccctgggt

SEQ ID NO: 2306 - DNA, 20 bp, Homo sapiens
aggccccagggagaggccct

SEQ ID NO: 2307 - DNA, 20 bp, Homo sapiens
caggccccagggagaggccc

SEQ ID NO: 2308 - DNA, 20 bp, Homo sapiens
acctacccagggcctctccc

SEQ ID NO: 2309 - DNA, 20 bp, Homo sapiens
cctacccagggcctctccct

SEQ ID NO: 2310 - DNA, 20 bp, Homo sapiens
ggagcccaggccccagggag

SEQ ID NO: 2311 - DNA, 20 bp, Homo sapiens
ctacccagggcctctccctg

SEQ ID NO: 2312 - DNA, 20 bp, Homo sapiens
aagcaggagcccaggcccca

SEQ ID NO: 2313 - DNA, 20 bp, Homo sapiens
cagggcctctccctggggcc

SEQ ID NO: 2314 - DNA, 20 bp, Homo sapiens
taagcaggagcccaggcccc

SEQ ID NO: 2315 - DNA, 20 bp, Homo sapiens
agggcctctccctggggcct

SEQ ID NO: 2316 - DNA, 20 bp, Homo sapiens
accaagctaagcaggagccc

SEQ ID NO: 2317 - DNA, 20 bp, Homo sapiens
gcctcccaaccaagctaagc

SEQ ID NO: 2318 - DNA, 20 bp, Homo sapiens
gcctgggctcctgcttagct

SEQ ID NO: 2319 - DNA, 20 bp, Homo sapiens
gggctcctgcttagcttggt

SEQ ID NO: 2320 - DNA, 20 bp, Homo sapiens
ggctcctgcttagcttggtt

SEQ ID NO: 2321 - DNA, 20 bp, Homo sapiens
tcctgcttagcttggttggg

SEQ ID NO: 2322 - DNA, 20 bp, Homo sapiens
ctttcttgggatgttggtct

SEQ ID NO: 2323 - DNA, 20 bp, Homo sapiens
tctcatctttcttgggatgt

SEQ ID NO: 2324 - DNA, 20 bp, Homo sapiens
gcttctgtctcatctttctt

SEQ ID NO: 2325 - DNA, 20 bp, Homo sapiens
ggcttctgtctcatctttct

SEQ ID NO: 2326 - DNA, 20 bp, Homo sapiens
ccaggcccaaaaaggtgatc

SEQ ID NO: 2327 - DNA, 20 bp, Homo sapiens
cagaagccagatcacctttt

SEQ ID NO: 2328 - DNA, 20 bp, Homo sapiens
agaagccagatcaccttttt

SEQ ID NO: 2329 - DNA, 20 bp, Homo sapiens
ttctgaagccaggcccaaaa

SEQ ID NO: 2330 - DNA, 20 bp, Homo sapiens
ccagatcacctttttgggcc

SEQ ID NO: 2331 - DNA, 20 bp, Homo sapiens
gctgggtgacttctgaagcc

SEQ ID NO: 2332 - DNA, 20 bp, Homo sapiens
aatgcagcagaagtgatgct

SEQ ID NO: 2333 - DNA, 20 bp, Homo sapiens
aaatgcagcagaagtgatgc

SEQ ID NO: 2334 - DNA, 20 bp, Homo sapiens
ccccctcccatcaagagatg

SEQ ID NO: 2335 - DNA, 20 bp, Homo sapiens
gccccctcccatcaagagat

SEQ ID NO: 2336 - DNA, 20 bp, Homo sapiens
ggccccctcccatcaagaga

SEQ ID NO: 2337 - DNA, 20 bp, Homo sapiens
agaccccatctcttgatggg

SEQ ID NO: 2338 - DNA, 20 bp, Homo sapiens
gaccccatctcttgatggga

SEQ ID NO: 2339 - DNA, 20 bp, Homo sapiens
accccatctcttgatgggag

SEQ ID NO: 2340 - DNA, 20 bp, Homo sapiens
ccccatctcttgatgggagg

SEQ ID NO: 2341 - DNA, 20 bp, Homo sapiens
cttgatgggagggggcctca

SEQ ID NO: 2342 - DNA, 20 bp, Homo sapiens
gaacatgtctacaaaccatg

SEQ ID NO: 2343 - DNA, 20 bp, Homo sapiens
gaagccaaggccgggcagag

SEQ ID NO: 2344 - DNA, 20 bp, Homo sapiens
ttctgaaactccactctgcc

SEQ ID NO: 2345 - DNA, 20 bp, Homo sapiens
aactccactctgcccggcct

SEQ ID NO: 2346 - DNA, 20 bp, Homo sapiens
gacacgtcgaagccaaggcc

SEQ ID NO: 2347 - DNA, 20 bp, Homo sapiens
agacacgtcgaagccaaggc

SEQ ID NO: 2348 - DNA, 20 bp, Homo sapiens
caccagacacgtcgaagcca

SEQ ID NO: 2349 - DNA, 20 bp, Homo sapiens
ggccttggcttcgacgtgtc

SEQ ID NO: 2350 - DNA, 20 bp, Homo sapiens
cgacgtgtctggtgaatgtg

SEQ ID NO: 2351 - DNA, 20 bp, Homo sapiens
gacgtgtctggtgaatgtgt

SEQ ID NO: 2352 - DNA, 20 bp, Homo sapiens
tggtgaatgtgtgggctgtg

SEQ ID NO: 2353 - DNA, 20 bp, Homo sapiens
cagtctgaggtctacgttcg

SEQ ID NO: 2354 - DNA, 20 bp, Homo sapiens
gcagtctgaggtctacgttc

SEQ ID NO: 2355 - DNA, 20 bp, Homo sapiens
tgcagtctgaggtctacgtt

SEQ ID NO: 2356 - DNA, 20 bp, Homo sapiens
acggccagcgttgcagtctg

SEQ ID NO: 2357 - DNA, 20 bp, Homo sapiens
tagacctcagactgcaacgc

SEQ ID NO: 2358 - DNA, 20 bp, Homo sapiens
actgcaacgctggccgttac

SEQ ID NO: 2359 - DNA, 20 bp, Homo sapiens
ctgcaacgctggccgttaca

SEQ ID NO: 2360 - DNA, 20 bp, Homo sapiens
ccgtgtgccagaccctgtaa

SEQ ID NO: 2361 - DNA, 20 bp, Homo sapiens
acgctggccgttacagggtc

SEQ ID NO: 2362 - DNA, 20 bp, Homo sapiens
ccgttacagggtctggcaca

SEQ ID NO: 2363 - DNA, 20 bp, Homo sapiens
cgttacagggtctggcacac

SEQ ID NO: 2364 - DNA, 20 bp, Homo sapiens
ctggcacacgggcccacgtc

SEQ ID NO: 2365 - DNA, 20 bp, Homo sapiens
tgtggcgatgggcctgacgt

SEQ ID NO: 2366 - DNA, 20 bp, Homo sapiens
ctgtggcgatgggcctgacg

SEQ ID NO: 2367 - DNA, 20 bp, Homo sapiens
acaaccatcactgtggcgat

SEQ ID NO: 2368 - DNA, 20 bp, Homo sapiens
aacaaccatcactgtggcga

SEQ ID NO: 2369 - DNA, 20 bp, Homo sapiens
caggcccatcgccacagtga

SEQ ID NO: 2370 - DNA, 20 bp, Homo sapiens
tcacagaacaaccatcactg

SEQ ID NO: 2371 - DNA, 20 bp, Homo sapiens
ggttgttctgtgactgtttc

SEQ ID NO: 2372 - DNA, 20 bp, Homo sapiens
tgttctgtgactgtttctgg

SEQ ID NO: 2373 - DNA, 20 bp, Homo sapiens
cagcctggagtgtggagcag

SEQ ID NO: 2374 - DNA, 20 bp, Homo sapiens
tggcctctgctccacactcc

SEQ ID NO: 2375 - DNA, 20 bp, Homo sapiens
cacagcgtcagcctggagtg

SEQ ID NO: 2376 - DNA, 20 bp, Homo sapiens
gaaggggcacagcgtcagcc

SEQ ID NO: 2377 - DNA, 20 bp, Homo sapiens
cccgagggtcccagtggaag

SEQ ID NO: 2378 - DNA, 20 bp, Homo sapiens
tgacgctgtgccccttccac

SEQ ID NO: 2379 - DNA, 20 bp, Homo sapiens
acccgagggtcccagtggaa

SEQ ID NO: 2380 - DNA, 20 bp, Homo sapiens
gacgctgtgccccttccact

SEQ ID NO: 2381 - DNA, 20 bp, Homo sapiens
cacccgagggtcccagtgga

SEQ ID NO: 2382 - DNA, 20 bp, Homo sapiens
aagccacccgagggtcccag

SEQ ID NO: 2383 - DNA, 20 bp, Homo sapiens
gccccttccactgggaccct

SEQ ID NO: 2384 - DNA, 20 bp, Homo sapiens
ccccttccactgggaccctc

SEQ ID NO: 2385 - DNA, 20 bp, Homo sapiens
cttccactgggaccctcggg

SEQ ID NO: 2386 - DNA, 20 bp, Homo sapiens
agtgcatggaagccacccga

SEQ ID NO: 2387 - DNA, 20 bp, Homo sapiens
aagtgcatggaagccacccg

SEQ ID NO: 2388 - DNA, 20 bp, Homo sapiens
ggatttagggcacaagtgca

SEQ ID NO: 2389 - DNA, 20 bp, Homo sapiens
tagtctaggagcaggattta

SEQ ID NO: 2390 - DNA, 20 bp, Homo sapiens
ttagtctaggagcaggattt

SEQ ID NO: 2391 - DNA, 20 bp, Homo sapiens
atgaagtttagtctaggagc

SEQ ID NO: 2392 - DNA, 20 bp, Homo sapiens
caggagatgaagtttagtct

SEQ ID NO: 2393 - DNA, 20 bp, Homo sapiens
atgctgcagaatgagaacac

SEQ ID NO: 2394 - DNA, 20 bp, Homo sapiens
tgtgttctcattctgcagca

SEQ ID NO: 2395 - DNA, 20 bp, Homo sapiens
cattctgcagcatggctgtt

SEQ ID NO: 2396 - DNA, 20 bp, Homo sapiens
attctgcagcatggctgtta

SEQ ID NO: 2397 - DNA, 20 bp, Homo sapiens
gagacgcgctgcagatggtc

SEQ ID NO: 2398 - DNA, 20 bp, Homo sapiens
gcaacgagacgcgctgcaga

SEQ ID NO: 2399 - DNA, 20 bp, Homo sapiens
tgcagcgcgtctcgttgcca

SEQ ID NO: 2400 - DNA, 20 bp, Homo sapiens
gaggcactgacattatacct

SEQ ID NO: 2401 - DNA, 20 bp, Homo sapiens
acatgggagccactgaaggg

SEQ ID NO: 2402 - DNA, 20 bp, Homo sapiens
atgtcagtgcctcccttcag

SEQ ID NO: 2403 - DNA, 20 bp, Homo sapiens
gtgacatgggagccactgaa

SEQ ID NO: 2404 - DNA, 20 bp, Homo sapiens
tgtgacatgggagccactga

SEQ ID NO: 2405 - DNA, 20 bp, Homo sapiens
gcaggacaattctgtgacat

SEQ ID NO: 2406 - DNA, 20 bp, Homo sapiens
tgcaggacaattctgtgaca

SEQ ID NO: 2407 - DNA, 20 bp, Homo sapiens
cacacatgtgccagggctgc

SEQ ID NO: 2408 - DNA, 20 bp, Homo sapiens
acagaattgtcctgcagccc

SEQ ID NO: 2409 - DNA, 20 bp, Homo sapiens
cacatggcacacatgtgcca

SEQ ID NO: 2410 - DNA, 20 bp, Homo sapiens
ccacatggcacacatgtgcc

SEQ ID NO: 2411 - DNA, 20 bp, Homo sapiens
cctggcacatgtgtgccatg

SEQ ID NO: 2412 - DNA, 20 bp, Homo sapiens
ctggcacatgtgtgccatgt

SEQ ID NO: 2413 - DNA, 20 bp, Homo sapiens
gacctgccccagctcccaca

SEQ ID NO: 2414 - DNA, 20 bp, Homo sapiens
catgtgtgccatgtgggagc

SEQ ID NO: 2415 - DNA, 20 bp, Homo sapiens
atgtgtgccatgtgggagct

SEQ ID NO: 2416 - DNA, 20 bp, Homo sapiens
tgtgtgccatgtgggagctg

SEQ ID NO: 2417 - DNA, 20 bp, Homo sapiens
tgccatgtgggagctggggc

SEQ ID NO: 2418 - DNA, 20 bp, Homo sapiens
tcggagccacaggaggaaag

SEQ ID NO: 2419 - DNA, 20 bp, Homo sapiens
gcaggtcctctttcctcctg

SEQ ID NO: 2420 - DNA, 20 bp, Homo sapiens
ccctccctcggagccacagg

SEQ ID NO: 2421 - DNA, 20 bp, Homo sapiens
gccccctccctcggagccac

SEQ ID NO: 2422 - DNA, 20 bp, Homo sapiens
tctttcctcctgtggctccg

SEQ ID NO: 2423 - DNA, 20 bp, Homo sapiens
ctttcctcctgtggctccga

SEQ ID NO: 2424 - DNA, 20 bp, Homo sapiens
tcctcctgtggctccgaggg

SEQ ID NO: 2425 - DNA, 20 bp, Homo sapiens
cctcctgtggctccgaggga

SEQ ID NO: 2426 - DNA, 20 bp, Homo sapiens
ctcctgtggctccgagggag

SEQ ID NO: 2427 - DNA, 20 bp, Homo sapiens
gaaggagcggccccctccct

SEQ ID NO: 2428 - DNA, 20 bp, Homo sapiens
tcctgtggctccgagggagg

SEQ ID NO: 2429 - DNA, 20 bp, Homo sapiens
ggtagagactggggaaggag

SEQ ID NO: 2430 - DNA, 20 bp, Homo sapiens
gtcagggtagagactgggga

SEQ ID NO: 2431 - DNA, 20 bp, Homo sapiens
ccaagtcagggtagagactg

SEQ ID NO: 2432 - DNA, 20 bp, Homo sapiens
gccaagtcagggtagagact

SEQ ID NO: 2433 - DNA, 20 bp, Homo sapiens
ggccaagtcagggtagagac

SEQ ID NO: 2434 - DNA, 20 bp, Homo sapiens
ccccagtctctaccctgact

SEQ ID NO: 2435 - DNA, 20 bp, Homo sapiens
gcaggacgagggccaagtca

SEQ ID NO: 2436 - DNA, 20 bp, Homo sapiens
tgcaggacgagggccaagtc

SEQ ID NO: 2437 - DNA, 20 bp, Homo sapiens
tctgagtggctgcaggacga

SEQ ID NO: 2438 - DNA, 20 bp, Homo sapiens
ctctgagtggctgcaggacg

SEQ ID NO: 2439 - DNA, 20 bp, Homo sapiens
cgtgctctctgagtggctgc

SEQ ID NO: 2440 - DNA, 20 bp, Homo sapiens
gctccatcgtgctctctgag

SEQ ID NO: 2441 - DNA, 20 bp, Homo sapiens
cagccactcagagagcacga

SEQ ID NO: 2442 - DNA, 20 bp, Homo sapiens
ctcagagagcacgatggagc

SEQ ID NO: 2443 - DNA, 20 bp, Homo sapiens
aaaagccggcgacacgcatt

SEQ ID NO: 2444 - DNA, 20 bp, Homo sapiens
tttgaccaaatgcgtgtcgc

SEQ ID NO: 2445 - DNA, 20 bp, Homo sapiens
acacacacacacacaaaagc

SEQ ID NO: 2446 - DNA, 20 bp, Homo sapiens
ttgtgtgtgtgtgtgtgtga

SEQ ID NO: 2447 - DNA, 20 bp, Homo sapiens
ggagtctcgctctgtcgccc

SEQ ID NO: 2448 - DNA, 20 bp, Homo sapiens
tctcgctctgtcgcccaggc

SEQ ID NO: 2449 - DNA, 20 bp, Homo sapiens
gtgccaatgcactccagcct

SEQ ID NO: 2450 - DNA, 20 bp, Homo sapiens
ggtgccaatgcactccagcc

SEQ ID NO: 2451 - DNA, 20 bp, Homo sapiens
tcgcccaggctggagtgcat

SEQ ID NO: 2452 - DNA, 20 bp, Homo sapiens
gaggttgcagtgggcagaga

SEQ ID NO: 2453 - DNA, 20 bp, Homo sapiens
caggaggcagaggttgcagt

SEQ ID NO: 2454 - DNA, 20 bp, Homo sapiens
ccaggaggcagaggttgcag

SEQ ID NO: 2455 - DNA, 20 bp, Homo sapiens
cacttgagcccaggaggcag

SEQ ID NO: 2456 - DNA, 20 bp, Homo sapiens
ccactgcaacctctgcctcc

SEQ ID NO: 2457 - DNA, 20 bp, Homo sapiens
cactgcaacctctgcctcct

SEQ ID NO: 2458 - DNA, 20 bp, Homo sapiens
gagaatcacttgagcccagg

SEQ ID NO: 2459 - DNA, 20 bp, Homo sapiens
caggagaatcacttgagccc

SEQ ID NO: 2460 - DNA, 20 bp, Homo sapiens
gctactcaggaggctgaggc

SEQ ID NO: 2461 - DNA, 20 bp, Homo sapiens
cccagctactcaggaggctg

SEQ ID NO: 2462 - DNA, 20 bp, Homo sapiens
tgtaatcccagctactcagg

SEQ ID NO: 2463 - DNA, 20 bp, Homo sapiens
gcctgtaatcccagctactc

SEQ ID NO: 2464 - DNA, 20 bp, Homo sapiens
gcctcagcctcctgagtagc

SEQ ID NO: 2465 - DNA, 20 bp, Homo sapiens
cctcagcctcctgagtagct

SEQ ID NO: 2466 - DNA, 20 bp, Homo sapiens
tcctgagtagctgggattac

SEQ ID NO: 2467 - DNA, 20 bp, Homo sapiens
aattagccaggtgtggtggt

SEQ ID NO: 2468 - DNA, 20 bp, Homo sapiens
aaattagccaggtgtggtgg

SEQ ID NO: 2469 - DNA, 20 bp, Homo sapiens
caaaaattagccaggtgtgg

SEQ ID NO: 2470 - DNA, 20 bp, Homo sapiens
caggcgcccaccaccacacc

SEQ ID NO: 2471 - DNA, 20 bp, Homo sapiens
atacaaaaattagccaggtg

SEQ ID NO: 2472 - DNA, 20 bp, Homo sapiens
taaaaatacaaaaattagcc

SEQ ID NO: 2473 - DNA, 20 bp, Homo sapiens
gagacagcgtttcaccatgt

SEQ ID NO: 2474 - DNA, 20 bp, Homo sapiens
caagactagcctggccaaca

SEQ ID NO: 2475 - DNA, 20 bp, Homo sapiens
agcgtttcaccatgttggcc

SEQ ID NO: 2476 - DNA, 20 bp, Homo sapiens
tcaggagttcaagactagcc

SEQ ID NO: 2477 - DNA, 20 bp, Homo sapiens
cgggcggatcatttgaagtc

SEQ ID NO: 2478 - DNA, 20 bp, Homo sapiens
ctttgggaggctgaggcggg

SEQ ID NO: 2479 - DNA, 20 bp, Homo sapiens
gcactttgggaggctgaggc

SEQ ID NO: 2480 - DNA, 20 bp, Homo sapiens
agcactttgggaggctgagg

SEQ ID NO: 2481 - DNA, 20 bp, Homo sapiens
cccagcactttgggaggctg

SEQ ID NO: 2482 - DNA, 20 bp, Homo sapiens
tgtaatcccagcactttggg

SEQ ID NO: 2483 - DNA, 20 bp, Homo sapiens
gcctgtaatcccagcacttt

SEQ ID NO: 2484 - DNA, 20 bp, Homo sapiens
gcctcagcctcccaaagtgc

SEQ ID NO: 2485 - DNA, 20 bp, Homo sapiens
tgcctgtaatcccagcactt

SEQ ID NO: 2486 - DNA, 20 bp, Homo sapiens
cctcagcctcccaaagtgct

SEQ ID NO: 2487 - DNA, 20 bp, Homo sapiens
tcccaaagtgctgggattac

SEQ ID NO: 2488 - DNA, 20 bp, Homo sapiens
gggattacaggcatgagccc

SEQ ID NO: 2489 - DNA, 20 bp, Homo sapiens
aatttgaaggccaggtgccg

SEQ ID NO: 2490 - DNA, 20 bp, Homo sapiens
caggcatgagccccggcacc

SEQ ID NO: 2491 - DNA, 20 bp, Homo sapiens
caatttgaaggccaggtgcc

SEQ ID NO: 2492 - DNA, 20 bp, Homo sapiens
ccaatttgaaggccaggtgc

SEQ ID NO: 2493 - DNA, 20 bp, Homo sapiens
taaaagccaatttgaaggcc

SEQ ID NO: 2494 - DNA, 20 bp, Homo sapiens
ccggcacctggccttcaaat

SEQ ID NO: 2495 - DNA, 20 bp, Homo sapiens
ttctttaaaagccaatttga

SEQ ID NO: 2496 - DNA, 20 bp, Homo sapiens
ttttaaagaagatgaccagc

SEQ ID NO: 2497 - DNA, 20 bp, Homo sapiens
cccagacagaacagaccagc

SEQ ID NO: 2498 - DNA, 20 bp, Homo sapiens
accagctggtctgttctgtc

SEQ ID NO: 2499 - DNA, 20 bp, Homo sapiens
ccagctggtctgttctgtct

SEQ ID NO: 2500 - DNA, 20 bp, Homo sapiens
cagctggtctgttctgtctg

SEQ ID NO: 2501 - DNA, 20 bp, Homo sapiens
gtctgttctgtctggggcct

SEQ ID NO: 2502 - DNA, 20 bp, Homo sapiens
tgttctgtctggggccttgg

SEQ ID NO: 2503 - DNA, 20 bp, Homo sapiens
gttctgtctggggccttgga

SEQ ID NO: 2504 - DNA, 20 bp, Homo sapiens
tcctgggaaacagccctcca

SEQ ID NO: 2505 - DNA, 20 bp, Homo sapiens
gccttggagggctgtttccc

SEQ ID NO: 2506 - DNA, 20 bp, Homo sapiens
gagggctgtttcccaggatg

SEQ ID NO: 2507 - DNA, 20 bp, Homo sapiens
ctgataaaggcccacatcct

SEQ ID NO: 2508 - DNA, 20 bp, Homo sapiens
agggctgtttcccaggatgt

SEQ ID NO: 2509 - DNA, 20 bp, Homo sapiens
actgataaaggcccacatcc

SEQ ID NO: 2510 - DNA, 20 bp, Homo sapiens
gcctaggtcagcactgataa

SEQ ID NO: 2511 - DNA, 20 bp, Homo sapiens
gcctttatcagtgctgacct

SEQ ID NO: 2512 - DNA, 20 bp, Homo sapiens
cagcttggccttgattgcct

SEQ ID NO: 2513 - DNA, 20 bp, Homo sapiens
agtgctgacctaggcaatca

SEQ ID NO: 2514 - DNA, 20 bp, Homo sapiens
ctaggcaatcaaggccaagc

SEQ ID NO: 2515 - DNA, 20 bp, Homo sapiens
caaaagcagtgtggccagct

SEQ ID NO: 2516 - DNA, 20 bp, Homo sapiens
aaaaaaaatcaaaagcagtg

SEQ ID NO: 2517 - DNA, 20 bp, Homo sapiens
acactccaaaatgactaaga

SEQ ID NO: 2518 - DNA, 20 bp, Homo sapiens
atttgccatcttagtcattt

SEQ ID NO: 2519 - DNA, 20 bp, Homo sapiens
tggctgcacagcaatgtgaa

SEQ ID NO: 2520 - DNA, 20 bp, Homo sapiens
ctggagatggatggtggtga

SEQ ID NO: 2521 - DNA, 20 bp, Homo sapiens
agagttctggagatggatgg

SEQ ID NO: 2522 - DNA, 20 bp, Homo sapiens
aaaagagttctggagatgga

SEQ ID NO: 2523 - DNA, 20 bp, Homo sapiens
gatgaaaagagttctggaga

SEQ ID NO: 2524 - DNA, 20 bp, Homo sapiens
tggcaagatgaaaagagttc

SEQ ID NO: 2525 - DNA, 20 bp, Homo sapiens
atggggacagagcttcaggt

SEQ ID NO: 2526 - DNA, 20 bp, Homo sapiens
ttttatggggacagagcttc

SEQ ID NO: 2527 - DNA, 20 bp, Homo sapiens
aatggagttgctattttatg

SEQ ID NO: 2528 - DNA, 20 bp, Homo sapiens
aaatggagttgctattttat

SEQ ID NO: 2529 - DNA, 20 bp, Homo sapiens
aaaatggagttgctatttta

SEQ ID NO: 2530 - DNA, 20 bp, Homo sapiens
gtgagctgggggagggaaaa

SEQ ID NO: 2531 - DNA, 20 bp, Homo sapiens
tggaatggtgagctggggga

SEQ ID NO: 2532 - DNA, 20 bp, Homo sapiens
atggaatggtgagctggggg

SEQ ID NO: 2533 - DNA, 20 bp, Homo sapiens
accatggaatggtgagctgg

SEQ ID NO: 2534 - DNA, 20 bp, Homo sapiens
gaccatggaatggtgagctg

SEQ ID NO: 2535 - DNA, 20 bp, Homo sapiens
agaccatggaatggtgagct

SEQ ID NO: 2536 - DNA, 20 bp, Homo sapiens
cagaccatggaatggtgagc

SEQ ID NO: 2537 - DNA, 20 bp, Homo sapiens
tcccccagctcaccattcca

SEQ ID NO: 2538 - DNA, 20 bp, Homo sapiens
cataacaacagaccatggaa

SEQ ID NO: 2539 - DNA, 20 bp, Homo sapiens
agactcataacaacagacca

SEQ ID NO: 2540 - DNA, 20 bp, Homo sapiens
ctccacttataaaaggtagt

SEQ ID NO: 2541 - DNA, 20 bp, Homo sapiens
ccattgactccacttataaa

SEQ ID NO: 2542 - DNA, 20 bp, Homo sapiens
ctccaactaccttttataag

SEQ ID NO: 2543 - DNA, 20 bp, Homo sapiens
ccttttataagtggagtcaa

SEQ ID NO: 2544 - DNA, 20 bp, Homo sapiens
tgagcccgacataaaaacac

SEQ ID NO: 2545 - DNA, 20 bp, Homo sapiens
tggtacctgtgtttttatgt

SEQ ID NO: 2546 - DNA, 20 bp, Homo sapiens
ggtacctgtgtttttatgtc

SEQ ID NO: 2547 - DNA, 20 bp, Homo sapiens
cactgagcgtgatgtcctca

SEQ ID NO: 2548 - DNA, 20 bp, Homo sapiens
tacaacctggatggaccgtg

SEQ ID NO: 2549 - DNA, 20 bp, Homo sapiens
gatgtcctcacggtccatcc

SEQ ID NO: 2550 - DNA, 20 bp, Homo sapiens
gacacttggtacaacctgga

SEQ ID NO: 2551 - DNA, 20 bp, Homo sapiens
ttctgacacttggtacaacc

SEQ ID NO: 2552 - DNA, 20 bp, Homo sapiens
aggaaggaaattctgacact

SEQ ID NO: 2553 - DNA, 20 bp, Homo sapiens
ggagtcagcagaaaacagga

SEQ ID NO: 2554 - DNA, 20 bp, Homo sapiens
gcagggagtcagcagaaaac

SEQ ID NO: 2555 - DNA, 20 bp, Homo sapiens
caagatggcctttaaaagca

SEQ ID NO: 2556 - DNA, 20 bp, Homo sapiens
ccaagatggcctttaaaagc

SEQ ID NO: 2557 - DNA, 20 bp, Homo sapiens
tgctgactccctgcttttaa

SEQ ID NO: 2558 - DNA, 20 bp, Homo sapiens
cctgcttttaaaggccatct

SEQ ID NO: 2559 - DNA, 20 bp, Homo sapiens
cacaatttgaatgtccaaga

SEQ ID NO: 2560 - DNA, 20 bp, Homo sapiens
catcttggacattcaaattg

SEQ ID NO: 2561 - DNA, 20 bp, Homo sapiens
gccattttaactgtcagtaa

SEQ ID NO: 2562 - DNA, 20 bp, Homo sapiens
gccattactgacagttaaaa

SEQ ID NO: 2563 - DNA, 20 bp, Homo sapiens
actgacagttaaaatggccc

SEQ ID NO: 2564 - DNA, 20 bp, Homo sapiens
ggctcaggagacatgagccg

SEQ ID NO: 2565 - DNA, 20 bp, Homo sapiens
aggctcaggagacatgagcc

SEQ ID NO: 2566 - DNA, 20 bp, Homo sapiens
gaggctcaggagacatgagc

SEQ ID NO: 2567 - DNA, 20 bp, Homo sapiens
ctaaaggattgtagaggctc

SEQ ID NO: 2568 - DNA, 20 bp, Homo sapiens
ccccacctaaaggattgtag

SEQ ID NO: 2569 - DNA, 20 bp, Homo sapiens
ctgagcctctacaatccttt

SEQ ID NO: 2570 - DNA, 20 bp, Homo sapiens
agcctctacaatcctttagg

SEQ ID NO: 2571 - DNA, 20 bp, Homo sapiens
gcctctacaatcctttaggt

SEQ ID NO: 2572 - DNA, 20 bp, Homo sapiens
gcagtactgtccccacctaa

SEQ ID NO: 2573 - DNA, 20 bp, Homo sapiens
cctctacaatcctttaggtg

SEQ ID NO: 2574 - DNA, 20 bp, Homo sapiens
tttaggtggggacagtactg

SEQ ID NO: 2575 - DNA, 20 bp, Homo sapiens
cgcagcctgtggggacgtgt

SEQ ID NO: 2576 - DNA, 20 bp, Homo sapiens
acgcagcctgtggggacgtg

SEQ ID NO: 2577 - DNA, 20 bp, Homo sapiens
tgcggcccacacgtccccac

SEQ ID NO: 2578 - DNA, 20 bp, Homo sapiens
ggtgtcacacgcagcctgtg

SEQ ID NO: 2579 - DNA, 20 bp, Homo sapiens
aggtgtcacacgcagcctgt

SEQ ID NO: 2580 - DNA, 20 bp, Homo sapiens
caggtgtcacacgcagcctg

SEQ ID NO: 2581 - DNA, 20 bp, Homo sapiens
cagtggcacaaagcactgtc

SEQ ID NO: 2582 - DNA, 20 bp, Homo sapiens
gacagtgctttgtgccactg

SEQ ID NO: 2583 - DNA, 20 bp, Homo sapiens
gagtgacacctgctccacag

SEQ ID NO: 2584 - DNA, 20 bp, Homo sapiens
gctttgtgccactgtggagc

SEQ ID NO: 2585 - DNA, 20 bp, Homo sapiens
cggcttcctctctgagaagt

SEQ ID NO: 2586 - DNA, 20 bp, Homo sapiens
ccggcttcctctctgagaag

SEQ ID NO: 2587 - DNA, 20 bp, Homo sapiens
cactctcccacttctcagag

SEQ ID NO: 2588 - DNA, 20 bp, Homo sapiens
ccacttctcagagaggaagc

SEQ ID NO: 2589 - DNA, 20 bp, Homo sapiens
cacttctcagagaggaagcc

SEQ ID NO: 2590 - DNA, 20 bp, Homo sapiens
tcagagaggaagccgggctc

SEQ ID NO: 2591 - DNA, 20 bp, Homo sapiens
ggctgctggcttccagagcc

SEQ ID NO: 2592 - DNA, 20 bp, Homo sapiens
tgggcctccttgtgggctgc

SEQ ID NO: 2593 - DNA, 20 bp, Homo sapiens
ctggaagccagcagcccaca

SEQ ID NO: 2594 - DNA, 20 bp, Homo sapiens
gaagccagcagcccacaagg

SEQ ID NO: 2595 - DNA, 20 bp, Homo sapiens
agcctgctgggcctccttgt

SEQ ID NO: 2596 - DNA, 20 bp, Homo sapiens
aagcctgctgggcctccttg

SEQ ID NO: 2597 - DNA, 20 bp, Homo sapiens
agcccacaaggaggcccagc

SEQ ID NO: 2598 - DNA, 20 bp, Homo sapiens
acctgggcccgaagcctgct

SEQ ID NO: 2599 - DNA, 20 bp, Homo sapiens
cacctgggcccgaagcctgc

SEQ ID NO: 2600 - DNA, 20 bp, Homo sapiens
caaggaggcccagcaggctt

SEQ ID NO: 2601 - DNA, 20 bp, Homo sapiens
aaggaggcccagcaggcttc

SEQ ID NO: 2602 - DNA, 20 bp, Homo sapiens
gcccagcaggcttcgggccc

SEQ ID NO: 2603 - DNA, 20 bp, Homo sapiens
cagcaggcttcgggcccagg

SEQ ID NO: 2604 - DNA, 20 bp, Homo sapiens
agcaggcttcgggcccaggt

SEQ ID NO: 2605 - DNA, 20 bp, Homo sapiens
gcaggcttcgggcccaggtg

SEQ ID NO: 2606 - DNA, 20 bp, Homo sapiens
atgtgcagacctccccacct

SEQ ID NO: 2607 - DNA, 20 bp, Homo sapiens
gatgtgcagacctccccacc

SEQ ID NO: 2608 - DNA, 20 bp, Homo sapiens
ggcttcgggcccaggtgggg

SEQ ID NO: 2609 - DNA, 20 bp, Homo sapiens
tggggaggtctgcacatctc

SEQ ID NO: 2610 - DNA, 20 bp, Homo sapiens
ggggaggtctgcacatctca

SEQ ID NO: 2611 - DNA, 20 bp, Homo sapiens
cacatctcagggcctttccc

SEQ ID NO: 2612 - DNA, 20 bp, Homo sapiens
acatctcagggcctttccct

SEQ ID NO: 2613 - DNA, 20 bp, Homo sapiens
ccctggttgttcccagggaa

SEQ ID NO: 2614 - DNA, 20 bp, Homo sapiens
tctgtccctggttgttccca

SEQ ID NO: 2615 - DNA, 20 bp, Homo sapiens
ctctgtccctggttgttccc

SEQ ID NO: 2616 - DNA, 20 bp, Homo sapiens
gcctttccctgggaacaacc

SEQ ID NO: 2617 - DNA, 20 bp, Homo sapiens
cctttccctgggaacaacca

SEQ ID NO: 2618 - DNA, 20 bp, Homo sapiens
gggtgtgtggcctctgtccc

SEQ ID NO: 2619 - DNA, 20 bp, Homo sapiens
ctgggaacaaccagggacag

SEQ ID NO: 2620 - DNA, 20 bp, Homo sapiens
cagagaggaggctgggtgtg

SEQ ID NO: 2621 - DNA, 20 bp, Homo sapiens
ctgtgggcagagaggaggct

SEQ ID NO: 2622 - DNA, 20 bp, Homo sapiens
actgtgggcagagaggaggc

SEQ ID NO: 2623 - DNA, 20 bp, Homo sapiens
attcactgtgggcagagagg

SEQ ID NO: 2624 - DNA, 20 bp, Homo sapiens
tcaattcactgtgggcagag

SEQ ID NO: 2625 - DNA, 20 bp, Homo sapiens
gttgtgtctcaattcactgt

SEQ ID NO: 2626 - DNA, 20 bp, Homo sapiens
ggttgtgtctcaattcactg

SEQ ID NO: 2627 - DNA, 20 bp, Homo sapiens
aaggctgggagggacgtaag

SEQ ID NO: 2628 - DNA, 20 bp, Homo sapiens
taaggctgggagggacgtaa

SEQ ID NO: 2629 - DNA, 20 bp, Homo sapiens
ttaaggctgggagggacgta

SEQ ID NO: 2630 - DNA, 20 bp, Homo sapiens
cacttgacttaaggctggga

SEQ ID NO: 2631 - DNA, 20 bp, Homo sapiens
ccacttgacttaaggctggg

SEQ ID NO: 2632 - DNA, 20 bp, Homo sapiens
tttccacttgacttaaggct

SEQ ID NO: 2633 - DNA, 20 bp, Homo sapiens
ctttccacttgacttaaggc

SEQ ID NO: 2634 - DNA, 20 bp, Homo sapiens
attgctttccacttgactta

SEQ ID NO: 2635 - DNA, 20 bp, Homo sapiens
cctcccagccttaagtcaag

SEQ ID NO: 2636 - DNA, 20 bp, Homo sapiens
ttaagtcaagtggaaagcaa

SEQ ID NO: 2637 - DNA, 20 bp, Homo sapiens
gtggaaagcaatggcccctg

SEQ ID NO: 2638 - DNA, 20 bp, Homo sapiens
gagggactaagtgacctcag

SEQ ID NO: 2639 - DNA, 20 bp, Homo sapiens
agagggactaagtgacctca

SEQ ID NO: 2640 - DNA, 20 bp, Homo sapiens
aagagggactaagtgacctc

SEQ ID NO: 2641 - DNA, 20 bp, Homo sapiens
gcacttacaaactggcaaga

SEQ ID NO: 2642 - DNA, 20 bp, Homo sapiens
agcacttacaaactggcaag

SEQ ID NO: 2643 - DNA, 20 bp, Homo sapiens
ctgattcagcacttacaaac

SEQ ID NO: 2644 - DNA, 20 bp, Homo sapiens
gaatcagagactctgagctt

SEQ ID NO: 2645 - DNA, 20 bp, Homo sapiens
aatcccgggaactcgggaaa

SEQ ID NO: 2646 - DNA, 20 bp, Homo sapiens
taatcccgggaactcgggaa

SEQ ID NO: 2647 - DNA, 20 bp, Homo sapiens
gctcataatcccgggaactc

SEQ ID NO: 2648 - DNA, 20 bp, Homo sapiens
ttggccctttcccgagttcc

SEQ ID NO: 2649 - DNA, 20 bp, Homo sapiens
agctcataatcccgggaact

SEQ ID NO: 2650 - DNA, 20 bp, Homo sapiens
tggccctttcccgagttccc

SEQ ID NO: 2651 - DNA, 20 bp, Homo sapiens
ctgtgtcagctcataatccc

SEQ ID NO: 2652 - DNA, 20 bp, Homo sapiens
gctgtgtcagctcataatcc

SEQ ID NO: 2653 - DNA, 20 bp, Homo sapiens
gaatcactgtggttgcttgg

SEQ ID NO: 2654 - DNA, 20 bp, Homo sapiens
ggaatcactgtggttgcttg

SEQ ID NO: 2655 - DNA, 20 bp, Homo sapiens
tggaatcactgtggttgctt

SEQ ID NO: 2656 - DNA, 20 bp, Homo sapiens
ctggaatcactgtggttgct

SEQ ID NO: 2657 - DNA, 20 bp, Homo sapiens
ctcccaggctggaatcactg

SEQ ID NO: 2658 - DNA, 20 bp, Homo sapiens
caaccacagtgattccagcc

SEQ ID NO: 2659 - DNA, 20 bp, Homo sapiens
aaccacagtgattccagcct

SEQ ID NO: 2660 - DNA, 20 bp, Homo sapiens
ccaaggccacactcccaggc

SEQ ID NO: 2661 - DNA, 20 bp, Homo sapiens
cccgccaaggccacactccc

SEQ ID NO: 2662 - DNA, 20 bp, Homo sapiens
gtgattccagcctgggagtg

SEQ ID NO: 2663 - DNA, 20 bp, Homo sapiens
ccagcctgggagtgtggcct

SEQ ID NO: 2664 - DNA, 20 bp, Homo sapiens
gcctgggagtgtggccttgg

SEQ ID NO: 2665 - DNA, 20 bp, Homo sapiens
cctgggagtgtggccttggc

SEQ ID NO: 2666 - DNA, 20 bp, Homo sapiens
gggcattgaccctcccgcca

SEQ ID NO: 2667 - DNA, 20 bp, Homo sapiens
gggagtgtggccttggcggg

SEQ ID NO: 2668 - DNA, 20 bp, Homo sapiens
ggagtgtggccttggcggga

SEQ ID NO: 2669 - DNA, 20 bp, Homo sapiens
ggagggtcaatgcccagtca

SEQ ID NO: 2670 - DNA, 20 bp, Homo sapiens
acagccgctgaaccatgact

SEQ ID NO: 2671 - DNA, 20 bp, Homo sapiens
cacagccgctgaaccatgac

SEQ ID NO: 2672 - DNA, 20 bp, Homo sapiens
aatgcccagtcatggttcag

SEQ ID NO: 2673 - DNA, 20 bp, Homo sapiens
cgtgggatgcaggtaagcag

SEQ ID NO: 2674 - DNA, 20 bp, Homo sapiens
gcgtgggatgcaggtaagca

SEQ ID NO: 2675 - DNA, 20 bp, Homo sapiens
agcgtgggatgcaggtaagc

SEQ ID NO: 2676 - DNA, 20 bp, Homo sapiens
gcatggaaagcgtgggatgc

SEQ ID NO: 2677 - DNA, 20 bp, Homo sapiens
tgagtttgcatggaaagcgt

SEQ ID NO: 2678 - DNA, 20 bp, Homo sapiens
gtgagtttgcatggaaagcg

SEQ ID NO: 2679 - DNA, 20 bp, Homo sapiens
cgccgccacgtgagtttgca

SEQ ID NO: 2680 - DNA, 20 bp, Homo sapiens
gctttccatgcaaactcacg

SEQ ID NO: 2681 - DNA, 20 bp, Homo sapiens
ttccatgcaaactcacgtgg

SEQ ID NO: 2682 - DNA, 20 bp, Homo sapiens
tggcggcgctttgcgcttgc

SEQ ID NO: 2683 - DNA, 20 bp, Homo sapiens
ggcgctttgcgcttgcagga

SEQ ID NO: 2684 - DNA, 20 bp, Homo sapiens
gtgtcagcacctttggctgg

SEQ ID NO: 2685 - DNA, 20 bp, Homo sapiens
ggtgtcagcacctttggctg

SEQ ID NO: 2686 - DNA, 20 bp, Homo sapiens
gatggtctacccccagccaa

SEQ ID NO: 2687 - DNA, 20 bp, Homo sapiens
cggtgtcagcacctttggct

SEQ ID NO: 2688 - DNA, 20 bp, Homo sapiens
acggtgtcagcacctttggc

SEQ ID NO: 2689 - DNA, 20 bp, Homo sapiens
caccacggtgtcagcacctt

SEQ ID NO: 2690 - DNA, 20 bp, Homo sapiens
agccaaaggtgctgacaccg

SEQ ID NO: 2691 - DNA, 20 bp, Homo sapiens
gtcagtaactttactcacca

SEQ ID NO: 2692 - DNA, 20 bp, Homo sapiens
ctgaaactgaacgcagctca

SEQ ID NO: 2693 - DNA, 20 bp, Homo sapiens
tgaaactgaacgcagctcaa

SEQ ID NO: 2694 - DNA, 20 bp, Homo sapiens
gaaactgaacgcagctcaag

SEQ ID NO: 2695 - DNA, 20 bp, Homo sapiens
agctcaaggggctgttctga

SEQ ID NO: 2696 - DNA, 20 bp, Homo sapiens
ggctgttctgaaggtattag

SEQ ID NO: 2697 - DNA, 20 bp, Homo sapiens
gctgttctgaaggtattaga

SEQ ID NO: 2698 - DNA, 20 bp, Homo sapiens
gttctgaaggtattagaggg

SEQ ID NO: 2699 - DNA, 20 bp, Homo sapiens
cccaactgagatttacatca

SEQ ID NO: 2700 - DNA, 20 bp, Homo sapiens
tccttgatgtaaatctcagt

SEQ ID NO: 2701 - DNA, 20 bp, Homo sapiens
ccttgatgtaaatctcagtt

SEQ ID NO: 2702 - DNA, 20 bp, Homo sapiens
cttgatgtaaatctcagttg

SEQ ID NO: 2703 - DNA, 20 bp, Homo sapiens
agatgtcaggagaatctgag

SEQ ID NO: 2704 - DNA, 20 bp, Homo sapiens
ggcctctgaattcagatgtc

SEQ ID NO: 2705 - DNA, 20 bp, Homo sapiens
ctcctgacatctgaattcag

SEQ ID NO: 2706 - DNA, 20 bp, Homo sapiens
tctgaattcagaggcccaca

SEQ ID NO: 2707 - DNA, 20 bp, Homo sapiens
gggaaagaggacagccatgt

SEQ ID NO: 2708 - DNA, 20 bp, Homo sapiens
agggaaagaggacagccatg

SEQ ID NO: 2709 - DNA, 20 bp, Homo sapiens
cagagaaagcaaagggaaag

SEQ ID NO: 2710 - DNA, 20 bp, Homo sapiens
cgcaagtcagagaaagcaaa

SEQ ID NO: 2711 - DNA, 20 bp, Homo sapiens
acgcaagtcagagaaagcaa

SEQ ID NO: 2712 - DNA, 20 bp, Homo sapiens
gctttggagaacaaagggac

SEQ ID NO: 2713 - DNA, 20 bp, Homo sapiens
caggggctttggagaacaaa

SEQ ID NO: 2714 - DNA, 20 bp, Homo sapiens
gcaggggctttggagaacaa

SEQ ID NO: 2715 - DNA, 20 bp, Homo sapiens
tcaggcctttgcaggggctt

SEQ ID NO: 2716 - DNA, 20 bp, Homo sapiens
gttctccaaagcccctgcaa

SEQ ID NO: 2717 - DNA, 20 bp, Homo sapiens
tacctatcaggcctttgcag

SEQ ID NO: 2718 - DNA, 20 bp, Homo sapiens
gtacctatcaggcctttgca

SEQ ID NO: 2719 - DNA, 20 bp, Homo sapiens
ggtacctatcaggcctttgc

SEQ ID NO: 2720 - DNA, 20 bp, Homo sapiens
agcccctgcaaaggcctgat

SEQ ID NO: 2721 - DNA, 20 bp, Homo sapiens
ccaggtaggaggtacctatc

SEQ ID NO: 2722 - DNA, 20 bp, Homo sapiens
cctgataggtacctcctacc

SEQ ID NO: 2723 - DNA, 20 bp, Homo sapiens
gctgcccctccccaggtagg

SEQ ID NO: 2724 - DNA, 20 bp, Homo sapiens
ctgataggtacctcctacct

SEQ ID NO: 2725 - DNA, 20 bp, Homo sapiens
tgataggtacctcctacctg

SEQ ID NO: 2726 - DNA, 20 bp, Homo sapiens
cccgctgcccctccccaggt

SEQ ID NO: 2727 - DNA, 20 bp, Homo sapiens
taggtacctcctacctgggg

SEQ ID NO: 2728 - DNA, 20 bp, Homo sapiens
aggtacctcctacctgggga

SEQ ID NO: 2729 - DNA, 20 bp, Homo sapiens
ggtacctcctacctggggag

SEQ ID NO: 2730 - DNA, 20 bp, Homo sapiens
aacccccgctgcccctcccc

SEQ ID NO: 2731 - DNA, 20 bp, Homo sapiens
tcctacctggggaggggcag

SEQ ID NO: 2732 - DNA, 20 bp, Homo sapiens
cctacctggggaggggcagc

SEQ ID NO: 2733 - DNA, 20 bp, Homo sapiens
ctacctggggaggggcagcg

SEQ ID NO: 2734 - DNA, 20 bp, Homo sapiens
tacctggggaggggcagcgg

SEQ ID NO: 2735 - DNA, 20 bp, Homo sapiens
tggggaggggcagcgggggt

SEQ ID NO: 2736 - DNA, 20 bp, Homo sapiens
ggggaggggcagcgggggtt

SEQ ID NO: 2737 - DNA, 20 bp, Homo sapiens
gggcagcgggggttgggtgc

SEQ ID NO: 2738 - DNA, 20 bp, Homo sapiens
ggcagcgggggttgggtgct

SEQ ID NO: 2739 - DNA, 20 bp, Homo sapiens
gcagcgggggttgggtgctg

SEQ ID NO: 2740 - DNA, 20 bp, Homo sapiens
gcgggggttgggtgctgggg

SEQ ID NO: 2741 - DNA, 20 bp, Homo sapiens
cgggggttgggtgctgggga

SEQ ID NO: 2742 - DNA, 20 bp, Homo sapiens
agctttgctggcaaagagat

SEQ ID NO: 2743 - DNA, 20 bp, Homo sapiens
cacagcaagctgagctttgc

SEQ ID NO: 2744 - DNA, 20 bp, Homo sapiens
agcttgctgtgtgttcccac

SEQ ID NO: 2745 - DNA, 20 bp, Homo sapiens
tccctcaacattggacctgt

SEQ ID NO: 2746 - DNA, 20 bp, Homo sapiens
ctccctcaacattggacctg

SEQ ID NO: 2747 - DNA, 20 bp, Homo sapiens
ttcccacaggtccaatgttg

SEQ ID NO: 2748 - DNA, 20 bp, Homo sapiens
tcccagccctccctcaacat

SEQ ID NO: 2749 - DNA, 20 bp, Homo sapiens
tcccacaggtccaatgttga

SEQ ID NO: 2750 - DNA, 20 bp, Homo sapiens
cacaggtccaatgttgaggg

SEQ ID NO: 2751 - DNA, 20 bp, Homo sapiens
acaggtccaatgttgaggga

SEQ ID NO: 2752 - DNA, 20 bp, Homo sapiens
gtccaatgttgagggagggc

SEQ ID NO: 2753 - DNA, 20 bp, Homo sapiens
tccaatgttgagggagggct

SEQ ID NO: 2754 - DNA, 20 bp, Homo sapiens
agggctgggaatgatttgcc

SEQ ID NO: 2755 - DNA, 20 bp, Homo sapiens
ctgggaatgatttgcccggt

SEQ ID NO: 2756 - DNA, 20 bp, Homo sapiens
aggcaaatgcgactccaacc

SEQ ID NO: 2757 - DNA, 20 bp, Homo sapiens
gaggcaaatgcgactccaac

SEQ ID NO: 2758 - DNA, 20 bp, Homo sapiens
gttggagtcgcatttgcctc

SEQ ID NO: 2759 - DNA, 20 bp, Homo sapiens
gagtcgcatttgcctctggt

SEQ ID NO: 2760 - DNA, 20 bp, Homo sapiens
ttccccgggaaaccaaccag

SEQ ID NO: 2761 - DNA, 20 bp, Homo sapiens
tttgcctctggttggtttcc

SEQ ID NO: 2762 - DNA, 20 bp, Homo sapiens
ttgcctctggttggtttccc

SEQ ID NO: 2763 - DNA, 20 bp, Homo sapiens
tgcctctggttggtttcccg

SEQ ID NO: 2764 - DNA, 20 bp, Homo sapiens
tctggttggtttcccgggga

SEQ ID NO: 2765 - DNA, 20 bp, Homo sapiens
ctggttggtttcccggggaa

SEQ ID NO: 2766 - DNA, 20 bp, Homo sapiens
agaggcagccgcccttcccc

SEQ ID NO: 2767 - DNA, 20 bp, Homo sapiens
cagaggcagccgcccttccc

SEQ ID NO: 2768 - DNA, 20 bp, Homo sapiens
gttggtttcccggggaaggg

SEQ ID NO: 2769 - DNA, 20 bp, Homo sapiens
cggggaagggcggctgcctc

SEQ ID NO: 2770 - DNA, 20 bp, Homo sapiens
gaagggcggctgcctctgga

SEQ ID NO: 2771 - DNA, 20 bp, Homo sapiens
aagggcggctgcctctggaa

SEQ ID NO: 2772 - DNA, 20 bp, Homo sapiens
tcctctgaccacccttccag

SEQ ID NO: 2773 - DNA, 20 bp, Homo sapiens
ggcggctgcctctggaaggg

SEQ ID NO: 2774 - DNA, 20 bp, Homo sapiens
gcctctggaagggtggtcag

SEQ ID NO: 2775 - DNA, 20 bp, Homo sapiens
tctggaagggtggtcagagg

SEQ ID NO: 2776 - DNA, 20 bp, Homo sapiens
cagaggaggcagaagctgag

SEQ ID NO: 2777 - DNA, 20 bp, Homo sapiens
agaagctgagtggagtttcc

SEQ ID NO: 2778 - DNA, 20 bp, Homo sapiens
agctgagtggagtttccagg

SEQ ID NO: 2779 - DNA, 20 bp, Homo sapiens
gctgagtggagtttccaggt

SEQ ID NO: 2780 - DNA, 20 bp, Homo sapiens
ctgagtggagtttccaggtg

SEQ ID NO: 2781 - DNA, 20 bp, Homo sapiens
tgagtggagtttccaggtgg

SEQ ID NO: 2782 - DNA, 20 bp, Homo sapiens
ggcacacggccgcccccacc

SEQ ID NO: 2783 - DNA, 20 bp, Homo sapiens
gtggagtttccaggtggggg

SEQ ID NO: 2784 - DNA, 20 bp, Homo sapiens
ccacatgcgcctctggcaca

SEQ ID NO: 2785 - DNA, 20 bp, Homo sapiens
tgggggcggccgtgtgccag

SEQ ID NO: 2786 - DNA, 20 bp, Homo sapiens
gtgccacccacatgcgcctc

SEQ ID NO: 2787 - DNA, 20 bp, Homo sapiens
ccgtgtgccagaggcgcatg

SEQ ID NO: 2788 - DNA, 20 bp, Homo sapiens
cgtgtgccagaggcgcatgt

SEQ ID NO: 2789 - DNA, 20 bp, Homo sapiens
gtgccagaggcgcatgtggg

SEQ ID NO: 2790 - DNA, 20 bp, Homo sapiens
gcggtcacatggagctggca

SEQ ID NO: 2791 - DNA, 20 bp, Homo sapiens
tgcggtcacatggagctggc

SEQ ID NO: 2792 - DNA, 20 bp, Homo sapiens
ggcgtgcggtcacatggagc

SEQ ID NO: 2793 - DNA, 20 bp, Homo sapiens
gagagaggcgtgcggtcaca

SEQ ID NO: 2794 - DNA, 20 bp, Homo sapiens
tgcacatggagagaggcgtg

SEQ ID NO: 2795 - DNA, 20 bp, Homo sapiens
ttcctactgcacatggagag

SEQ ID NO: 2796 - DNA, 20 bp, Homo sapiens
gacatccttcctactgcaca

SEQ ID NO: 2797 - DNA, 20 bp, Homo sapiens
cgcctctctccatgtgcagt

SEQ ID NO: 2798 - DNA, 20 bp, Homo sapiens
tctctccatgtgcagtagga

SEQ ID NO: 2799 - DNA, 20 bp, Homo sapiens
cagtaggaaggatgtcctcg

SEQ ID NO: 2800 - DNA, 20 bp, Homo sapiens
gccagccaaggggtaccacg

SEQ ID NO: 2801 - DNA, 20 bp, Homo sapiens
gatgtcctcgtggtacccct

SEQ ID NO: 2802 - DNA, 20 bp, Homo sapiens
tcctcgtggtaccccttggc

SEQ ID NO: 2803 - DNA, 20 bp, Homo sapiens
gacaatgggagccagccaag

SEQ ID NO: 2804 - DNA, 20 bp, Homo sapiens
agacaatgggagccagccaa

SEQ ID NO: 2805 - DNA, 20 bp, Homo sapiens
cagacaatgggagccagcca

SEQ ID NO: 2806 - DNA, 20 bp, Homo sapiens
cttggctggctcccattgtc

SEQ ID NO: 2807 - DNA, 20 bp, Homo sapiens
aatgtgccctcccagacaat

SEQ ID NO: 2808 - DNA, 20 bp, Homo sapiens
ttggctggctcccattgtct

SEQ ID NO: 2809 - DNA, 20 bp, Homo sapiens
gaatgtgccctcccagacaa

SEQ ID NO: 2810 - DNA, 20 bp, Homo sapiens
gctggctcccattgtctggg

SEQ ID NO: 2811 - DNA, 20 bp, Homo sapiens
ctggctcccattgtctggga

SEQ ID NO: 2812 - DNA, 20 bp, Homo sapiens
ggagcctgaactgctcgttg

SEQ ID NO: 2813 - DNA, 20 bp, Homo sapiens
acatcctcaacgagcagttc

SEQ ID NO: 2814 - DNA, 20 bp, Homo sapiens
ttaacccaatggtggtgttc

SEQ ID NO: 2815 - DNA, 20 bp, Homo sapiens
aggctccagaacaccaccat

SEQ ID NO: 2816 - DNA, 20 bp, Homo sapiens
ggctccagaacaccaccatt

SEQ ID NO: 2817 - DNA, 20 bp, Homo sapiens
aaacacagttaacccaatgg

SEQ ID NO: 2818 - DNA, 20 bp, Homo sapiens
ggcaaacacagttaacccaa

SEQ ID NO: 2819 - DNA, 20 bp, Homo sapiens
ctcactgacttacttcttga

SEQ ID NO: 2820 - DNA, 20 bp, Homo sapiens
catcaagaagtaagtcagtg

SEQ ID NO: 2821 - DNA, 20 bp, Homo sapiens
caagaagtaagtcagtgagg

SEQ ID NO: 2822 - DNA, 20 bp, Homo sapiens
gtaagtcagtgaggtggccg

SEQ ID NO: 2823 - DNA, 20 bp, Homo sapiens
taagtcagtgaggtggccga

SEQ ID NO: 2824 - DNA, 20 bp, Homo sapiens
actgcctgggtctctaccct

SEQ ID NO: 2825 - DNA, 20 bp, Homo sapiens
gtggccgagggtagagaccc

SEQ ID NO: 2826 - DNA, 20 bp, Homo sapiens
gagggtagagacccaggcag

SEQ ID NO: 2827 - DNA, 20 bp, Homo sapiens
acagtcactcgccactgcct

SEQ ID NO: 2828 - DNA, 20 bp, Homo sapiens
cacagtcactcgccactgcc

SEQ ID NO: 2829 - DNA, 20 bp, Homo sapiens
caggcagtggcgagtgactg

SEQ ID NO: 2830 - DNA, 20 bp, Homo sapiens
gcgagtgactgtggacattg

SEQ ID NO: 2831 - DNA, 20 bp, Homo sapiens
cccactctgtcttgaacaca

SEQ ID NO: 2832 - DNA, 20 bp, Homo sapiens
tccttgtgttcaagacagag

SEQ ID NO: 2833 - DNA, 20 bp, Homo sapiens
ccttgtgttcaagacagagt

SEQ ID NO: 2834 - DNA, 20 bp, Homo sapiens
cttgtgttcaagacagagtg

SEQ ID NO: 2835 - DNA, 20 bp, Homo sapiens
gtgttcaagacagagtgggg

SEQ ID NO: 2836 - DNA, 20 bp, Homo sapiens
ttcaagacagagtggggtgg

SEQ ID NO: 2837 - DNA, 20 bp, Homo sapiens
accctctgggaggacaaggc

SEQ ID NO: 2838 - DNA, 20 bp, Homo sapiens
atctaccctctgggaggaca

SEQ ID NO: 2839 - DNA, 20 bp, Homo sapiens
ggccagccttgtcctcccag

SEQ ID NO: 2840 - DNA, 20 bp, Homo sapiens
gccagccttgtcctcccaga

SEQ ID NO: 2841 - DNA, 20 bp, Homo sapiens
tttcccatctaccctctggg

SEQ ID NO: 2842 - DNA, 20 bp, Homo sapiens
acctttcccatctaccctct

SEQ ID NO: 2843 - DNA, 20 bp, Homo sapiens
gacctttcccatctaccctc

SEQ ID NO: 2844 - DNA, 20 bp, Homo sapiens
ttgtcctcccagagggtaga

SEQ ID NO: 2845 - DNA, 20 bp, Homo sapiens
tgtcctcccagagggtagat

SEQ ID NO: 2846 - DNA, 20 bp, Homo sapiens
tcccagagggtagatgggaa

SEQ ID NO: 2847 - DNA, 20 bp, Homo sapiens
agcatcttactgagctcatg

SEQ ID NO: 2848 - DNA, 20 bp, Homo sapiens
gcatcttactgagctcatgt

SEQ ID NO: 2849 - DNA, 20 bp, Homo sapiens
actgagctcatgtgggctcg

SEQ ID NO: 2850 - DNA, 20 bp, Homo sapiens
ctgagctcatgtgggctcgt

SEQ ID NO: 2851 - DNA, 20 bp, Homo sapiens
catgtgggctcgtgggctcg

SEQ ID NO: 2852 - DNA, 20 bp, Homo sapiens
atgtgggctcgtgggctcgt

SEQ ID NO: 2853 - DNA, 20 bp, Homo sapiens
cgtgggctcgtgggctcgcc

SEQ ID NO: 2854 - DNA, 20 bp, Homo sapiens
ggctcgtgggctcgccaggt

SEQ ID NO: 2855 - DNA, 20 bp, Homo sapiens
ggagctgggttttaccgacc

SEQ ID NO: 2856 - DNA, 20 bp, Homo sapiens
cagcctctggagaaggagct

SEQ ID NO: 2857 - DNA, 20 bp, Homo sapiens
gcagcctctggagaaggagc

SEQ ID NO: 2858 - DNA, 20 bp, Homo sapiens
tgagacgcagcctctggaga

SEQ ID NO: 2859 - DNA, 20 bp, Homo sapiens
aaacccagctccttctccag

SEQ ID NO: 2860 - DNA, 20 bp, Homo sapiens
cctgggtgagacgcagcctc

SEQ ID NO: 2861 - DNA, 20 bp, Homo sapiens
ccagaggctgcgtctcaccc

SEQ ID NO: 2862 - DNA, 20 bp, Homo sapiens
cagaggctgcgtctcaccca

SEQ ID NO: 2863 - DNA, 20 bp, Homo sapiens
ggctgcgtctcacccaggga

SEQ ID NO: 2864 - DNA, 20 bp, Homo sapiens
cagcagaagccaccatccct

SEQ ID NO: 2865 - DNA, 20 bp, Homo sapiens
gcagcagaagccaccatccc

SEQ ID NO: 2866 - DNA, 20 bp, Homo sapiens
tgcgtctcacccagggatgg

SEQ ID NO: 2867 - DNA, 20 bp, Homo sapiens
ccacagttacagagaggagg

SEQ ID NO: 2868 - DNA, 20 bp, Homo sapiens
gccacagttacagagaggag

SEQ ID NO: 2869 - DNA, 20 bp, Homo sapiens
ggccacagttacagagagga

SEQ ID NO: 2870 - DNA, 20 bp, Homo sapiens
cggccacagttacagagagg

SEQ ID NO: 2871 - DNA, 20 bp, Homo sapiens
ggccggccacagttacagag

SEQ ID NO: 2872 - DNA, 20 bp, Homo sapiens
ccccctcctctctgtaactg

SEQ ID NO: 2873 - DNA, 20 bp, Homo sapiens
ctcctctctgtaactgtggc

SEQ ID NO: 2874 - DNA, 20 bp, Homo sapiens
gggtggctcagcatgacggc

SEQ ID NO: 2875 - DNA, 20 bp, Homo sapiens
gagggggtggctcagcatga

SEQ ID NO: 2876 - DNA, 20 bp, Homo sapiens
ggagccttgtattgaggggg

SEQ ID NO: 2877 - DNA, 20 bp, Homo sapiens
tctggagccttgtattgagg

SEQ ID NO: 2878 - DNA, 20 bp, Homo sapiens
atctggagccttgtattgag

SEQ ID NO: 2879 - DNA, 20 bp, Homo sapiens
catctggagccttgtattga

SEQ ID NO: 2880 - DNA, 20 bp, Homo sapiens
acatctggagccttgtattg

SEQ ID NO: 2881 - DNA, 20 bp, Homo sapiens
tgagccaccccctcaataca

SEQ ID NO: 2882 - DNA, 20 bp, Homo sapiens
gtcagtgagcaggaaacatc

SEQ ID NO: 2883 - DNA, 20 bp, Homo sapiens
gctatctctggtcagtgagc

SEQ ID NO: 2884 - DNA, 20 bp, Homo sapiens
tgtccccctcctgctatctc

SEQ ID NO: 2885 - DNA, 20 bp, Homo sapiens
gctcactgaccagagatagc

SEQ ID NO: 2886 - DNA, 20 bp, Homo sapiens
cactgaccagagatagcagg

SEQ ID NO: 2887 - DNA, 20 bp, Homo sapiens
actgaccagagatagcagga

SEQ ID NO: 2888 - DNA, 20 bp, Homo sapiens
ctgaccagagatagcaggag

SEQ ID NO: 2889 - DNA, 20 bp, Homo sapiens
tgaccagagatagcaggagg

SEQ ID NO: 2890 - DNA, 20 bp, Homo sapiens
agggtccaaggacagcaaac

SEQ ID NO: 2891 - DNA, 20 bp, Homo sapiens
ggacacctgtttgctgtcct

SEQ ID NO: 2892 - DNA, 20 bp, Homo sapiens
catcctctttctagggtcca

SEQ ID NO: 2893 - DNA, 20 bp, Homo sapiens
ctgccagcatcctctttcta

SEQ ID NO: 2894 - DNA, 20 bp, Homo sapiens
tgtccttggaccctagaaag

SEQ ID NO: 2895 - DNA, 20 bp, Homo sapiens
tctgccagcatcctctttct

SEQ ID NO: 2896 - DNA, 20 bp, Homo sapiens
ggaccctagaaagaggatgc

SEQ ID NO: 2897 - DNA, 20 bp, Homo sapiens
agaggatgctggcagagccg

SEQ ID NO: 2898 - DNA, 20 bp, Homo sapiens
atctgacagagaagtgacca

SEQ ID NO: 2899 - DNA, 20 bp, Homo sapiens
gtcacttctctgtcagatgt

SEQ ID NO: 2900 - DNA, 20 bp, Homo sapiens
acttctctgtcagatgtagg

SEQ ID NO: 2901 - DNA, 20 bp, Homo sapiens
cttctctgtcagatgtaggt

SEQ ID NO: 2902 - DNA, 20 bp, Homo sapiens
ttctctgtcagatgtaggtg

SEQ ID NO: 2903 - DNA, 20 bp, Homo sapiens
ctgtcagatgtaggtggggc

SEQ ID NO: 2904 - DNA, 20 bp, Homo sapiens
ggtggggcaggcaaagcagt

SEQ ID NO: 2905 - DNA, 20 bp, Homo sapiens
gccacttcctttggtgtctg

SEQ ID NO: 2906 - DNA, 20 bp, Homo sapiens
agccacttcctttggtgtct

SEQ ID NO: 2907 - DNA, 20 bp, Homo sapiens
cagccacttcctttggtgtc

SEQ ID NO: 2908 - DNA, 20 bp, Homo sapiens
cagttggccccagacaccaa

SEQ ID NO: 2909 - DNA, 20 bp, Homo sapiens
tgtgggtcagccacttcctt

SEQ ID NO: 2910 - DNA, 20 bp, Homo sapiens
gccccagacaccaaaggaag

SEQ ID NO: 2911 - DNA, 20 bp, Homo sapiens
aaggaagtggctgacccaca

SEQ ID NO: 2912 - DNA, 20 bp, Homo sapiens
ccagagtcccagggccttgt

SEQ ID NO: 2913 - DNA, 20 bp, Homo sapiens
cccagagtcccagggccttg

SEQ ID NO: 2914 - DNA, 20 bp, Homo sapiens
gtggctgacccacaaggccc

SEQ ID NO: 2915 - DNA, 20 bp, Homo sapiens
tggctgacccacaaggccct

SEQ ID NO: 2916 - DNA, 20 bp, Homo sapiens
tggcctggcccagagtccca

SEQ ID NO: 2917 - DNA, 20 bp, Homo sapiens
ctggcctggcccagagtccc

SEQ ID NO: 2918 - DNA, 20 bp, Homo sapiens
cccacaaggccctgggactc

SEQ ID NO: 2919 - DNA, 20 bp, Homo sapiens
ccacaaggccctgggactct

SEQ ID NO: 2920 - DNA, 20 bp, Homo sapiens
aggccctgggactctgggcc

SEQ ID NO: 2921 - DNA, 20 bp, Homo sapiens
ggctagctccctctctggcc

SEQ ID NO: 2922 - DNA, 20 bp, Homo sapiens
gactctgggccaggccagag

SEQ ID NO: 2923 - DNA, 20 bp, Homo sapiens
actctgggccaggccagaga

SEQ ID NO: 2924 - DNA, 20 bp, Homo sapiens
tgcctggctagctccctctc

SEQ ID NO: 2925 - DNA, 20 bp, Homo sapiens
ggccagagagggagctagcc

SEQ ID NO: 2926 - DNA, 20 bp, Homo sapiens
agtatgtgtctgcggttgcc

SEQ ID NO: 2927 - DNA, 20 bp, Homo sapiens
agaagtcaagtatgtgtctg

SEQ ID NO: 2928 - DNA, 20 bp, Homo sapiens
cagacacatacttgacttct

SEQ ID NO: 2929 - DNA, 20 bp, Homo sapiens
acttgacttctcggcagctg

SEQ ID NO: 2930 - DNA, 20 bp, Homo sapiens
cttgacttctcggcagctgt

SEQ ID NO: 2931 - DNA, 20 bp, Homo sapiens
tctcggcagctgtgggcagc

SEQ ID NO: 2932 - DNA, 20 bp, Homo sapiens
ctcggcagctgtgggcagct

SEQ ID NO: 2933 - DNA, 20 bp, Homo sapiens
ctggcctccgccactgtcgc

SEQ ID NO: 2934 - DNA, 20 bp, Homo sapiens
ggcagctgggccagcgacag

SEQ ID NO: 2935 - DNA, 20 bp, Homo sapiens
agctgggccagcgacagtgg

SEQ ID NO: 2936 - DNA, 20 bp, Homo sapiens
tgggccagcgacagtggcgg

SEQ ID NO: 2937 - DNA, 20 bp, Homo sapiens
cagcgacagtggcggaggcc

SEQ ID NO: 2938 - DNA, 20 bp, Homo sapiens
tcctaagagtaagtcattcc

SEQ ID NO: 2939 - DNA, 20 bp, Homo sapiens
gccaggaatgacttactctt

SEQ ID NO: 2940 - DNA, 20 bp, Homo sapiens
aatgacttactcttaggaat

SEQ ID NO: 2941 - DNA, 20 bp, Homo sapiens
gaataggtgcagttcaagcc

SEQ ID NO: 2942 - DNA, 20 bp, Homo sapiens
taggtgcagttcaagcctgg

SEQ ID NO: 2943 - DNA, 20 bp, Homo sapiens
aggtgcagttcaagcctgga

SEQ ID NO: 2944 - DNA, 20 bp, Homo sapiens
tgcagttcaagcctggaggg

SEQ ID NO: 2945 - DNA, 20 bp, Homo sapiens
ccctagagcttcctccctcc

SEQ ID NO: 2946 - DNA, 20 bp, Homo sapiens
gcctggagggaggaagctct

SEQ ID NO: 2947 - DNA, 20 bp, Homo sapiens
cctggagggaggaagctcta

SEQ ID NO: 2948 - DNA, 20 bp, Homo sapiens
gaggaagctctagggtgcag

SEQ ID NO: 2949 - DNA, 20 bp, Homo sapiens
gaagctctagggtgcagagg

SEQ ID NO: 2950 - DNA, 20 bp, Homo sapiens
aagctctagggtgcagaggc

SEQ ID NO: 2951 - DNA, 20 bp, Homo sapiens
agggtgcagaggcgggtgtg

SEQ ID NO: 2952 - DNA, 20 bp, Homo sapiens
gtgcagaggcgggtgtgtgg

SEQ ID NO: 2953 - DNA, 20 bp, Homo sapiens
ctcattataagctgcacgcg

SEQ ID NO: 2954 - DNA, 20 bp, Homo sapiens
ctcgcgtgcagcttataatg

SEQ ID NO: 2955 - DNA, 20 bp, Homo sapiens
tcgcgtgcagcttataatga

SEQ ID NO: 2956 - DNA, 20 bp, Homo sapiens
gcttataatgagggagcacg

SEQ ID NO: 2957 - DNA, 20 bp, Homo sapiens
ataatgagggagcacgtggc

SEQ ID NO: 2958 - DNA, 20 bp, Homo sapiens
gagggagcacgtggccggcc

SEQ ID NO: 2959 - DNA, 20 bp, Homo sapiens
tgcccctcttatggccaggc

SEQ ID NO: 2960 - DNA, 20 bp, Homo sapiens
cagctgcccctcttatggcc

SEQ ID NO: 2961 - DNA, 20 bp, Homo sapiens
gtggccggcctggccataag

SEQ ID NO: 2962 - DNA, 20 bp, Homo sapiens
tggccggcctggccataaga

SEQ ID NO: 2963 - DNA, 20 bp, Homo sapiens
ggccggcctggccataagag

SEQ ID NO: 2964 - DNA, 20 bp, Homo sapiens
ccacgcagctgcccctctta

SEQ ID NO: 2965 - DNA, 20 bp, Homo sapiens
ccataagaggggcagctgcg

SEQ ID NO: 2966 - DNA, 20 bp, Homo sapiens
cataagaggggcagctgcgt

SEQ ID NO: 2967 - DNA, 20 bp, Homo sapiens
ataagaggggcagctgcgtg

SEQ ID NO: 2968 - DNA, 20 bp, Homo sapiens
agaggggcagctgcgtgggg

SEQ ID NO: 2969 - DNA, 20 bp, Homo sapiens
ggcagctgcgtggggaggcg

SEQ ID NO: 2970 - DNA, 20 bp, Homo sapiens
tgcgtggggaggcgtggctc

SEQ ID NO: 2971 - DNA, 20 bp, Homo sapiens
ggggaggcgtggctcaggcc

SEQ ID NO: 2972 - DNA, 20 bp, Homo sapiens
gcgtggctcaggccaggctg

SEQ ID NO: 2973 - DNA, 20 bp, Homo sapiens
cgtggctcaggccaggctga

SEQ ID NO: 2974 - DNA, 20 bp, Homo sapiens
ctgctcactccccctcagcc

SEQ ID NO: 2975 - DNA, 20 bp, Homo sapiens
gtggctcaggccaggctgag

SEQ ID NO: 2976 - DNA, 20 bp, Homo sapiens
tggctcaggccaggctgagg

SEQ ID NO: 2977 - DNA, 20 bp, Homo sapiens
agtgagcagacgccagcctg

SEQ ID NO: 2978 - DNA, 20 bp, Homo sapiens
gctggtagcaggccgcaggc

SEQ ID NO: 2979 - DNA, 20 bp, Homo sapiens
ggaggctggtagcaggccgc

SEQ ID NO: 2980 - DNA, 20 bp, Homo sapiens
ggtggctggaggctggtagc

SEQ ID NO: 2981 - DNA, 20 bp, Homo sapiens
gagggcaggtggctggaggc

SEQ ID NO: 2982 - DNA, 20 bp, Homo sapiens
ggctgagggcaggtggctgg

SEQ ID NO: 2983 - DNA, 20 bp, Homo sapiens
gagggctgagggcaggtggc

SEQ ID NO: 2984 - DNA, 20 bp, Homo sapiens
taaggagggctgagggcagg

SEQ ID NO: 2985 - DNA, 20 bp, Homo sapiens
tactaaggagggctgagggc

SEQ ID NO: 2986 - DNA, 20 bp, Homo sapiens
ctcttactaaggagggctga

SEQ ID NO: 2987 - DNA, 20 bp, Homo sapiens
cctcttactaaggagggctg

SEQ ID NO: 2988 - DNA, 20 bp, Homo sapiens
gcaccccctcttactaagga

SEQ ID NO: 2989 - DNA, 20 bp, Homo sapiens
agcaccccctcttactaagg

SEQ ID NO: 2990 - DNA, 20 bp, Homo sapiens
accagcaccccctcttacta

SEQ ID NO: 2991 - DNA, 20 bp, Homo sapiens
cctcagccctccttagtaag

SEQ ID NO: 2992 - DNA, 20 bp, Homo sapiens
ctcagccctccttagtaaga

SEQ ID NO: 2993 - DNA, 20 bp, Homo sapiens
tcagccctccttagtaagag

SEQ ID NO: 2994 - DNA, 20 bp, Homo sapiens
cagccctccttagtaagagg

SEQ ID NO: 2995 - DNA, 20 bp, Homo sapiens
tccttagtaagagggggtgc

SEQ ID NO: 2996 - DNA, 20 bp, Homo sapiens
ttagtaagagggggtgctgg

SEQ ID NO: 2997 - DNA, 20 bp, Homo sapiens
catcctcttcccagcgatgg

SEQ ID NO: 2998 - DNA, 20 bp, Homo sapiens
tgctggtggtcccccatcgc

SEQ ID NO: 2999 - DNA, 20 bp, Homo sapiens
tcatcctcttcccagcgatg

SEQ ID NO: 3000 - DNA, 20 bp, Homo sapiens
gctggtggtcccccatcgct

SEQ ID NO: 3001 - DNA, 20 bp, Homo sapiens
ttcatcctcttcccagcgat

SEQ ID NO: 3002 - DNA, 20 bp, Homo sapiens
cttcatcctcttcccagcga

SEQ ID NO: 3003 - DNA, 20 bp, Homo sapiens
ggtcccccatcgctgggaag

SEQ ID NO: 3004 - DNA, 20 bp, Homo sapiens
atgaagtgaatcgcagcccg

SEQ ID NO: 3005 - DNA, 20 bp, Homo sapiens
cctgtcctgagcgagtcctc

SEQ ID NO: 3006 - DNA, 20 bp, Homo sapiens
ccctgtcctgagcgagtcct

SEQ ID NO: 3007 - DNA, 20 bp, Homo sapiens
cgcagcccgaggactcgctc

SEQ ID NO: 3008 - DNA, 20 bp, Homo sapiens
cccgaggactcgctcaggac

SEQ ID NO: 3009 - DNA, 20 bp, Homo sapiens
ccgaggactcgctcaggaca

SEQ ID NO: 3010 - DNA, 20 bp, Homo sapiens
ggactcgctcaggacagggc

SEQ ID NO: 3011 - DNA, 20 bp, Homo sapiens
caggacagggcaggagaacg

SEQ ID NO: 3012 - DNA, 20 bp, Homo sapiens
tgctgctctaagccttccaa

SEQ ID NO: 3013 - DNA, 20 bp, Homo sapiens
gcccgccagcggccattgga

SEQ ID NO: 3014 - DNA, 20 bp, Homo sapiens
acccgcccgccagcggccat

SEQ ID NO: 3015 - DNA, 20 bp, Homo sapiens
ctaagccttccaatggccgc

SEQ ID NO: 3016 - DNA, 20 bp, Homo sapiens
agccttccaatggccgctgg

SEQ ID NO: 3017 - DNA, 20 bp, Homo sapiens
gccttccaatggccgctggc

SEQ ID NO: 3018 - DNA, 20 bp, Homo sapiens
gtcctgcacccgcccgccag

SEQ ID NO: 3019 - DNA, 20 bp, Homo sapiens
ttccaatggccgctggcggg

SEQ ID NO: 3020 - DNA, 20 bp, Homo sapiens
tccaatggccgctggcgggc

SEQ ID NO: 3021 - DNA, 20 bp, Homo sapiens
ggccgctggcgggcgggtgc

SEQ ID NO: 3022 - DNA, 20 bp, Homo sapiens
gctggcgggcgggtgcagga

SEQ ID NO: 3023 - DNA, 20 bp, Homo sapiens
ctggcgggcgggtgcaggac

SEQ ID NO: 3024 - DNA, 20 bp, Homo sapiens
gtgcacccctgggctgcagg

SEQ ID NO: 3025 - DNA, 20 bp, Homo sapiens
gccgtgcacccctgggctgc

SEQ ID NO: 3026 - DNA, 20 bp, Homo sapiens
ggacgggcctcctgcagccc

SEQ ID NO: 3027 - DNA, 20 bp, Homo sapiens
gacgggcctcctgcagccca

SEQ ID NO: 3028 - DNA, 20 bp, Homo sapiens
acgggcctcctgcagcccag

SEQ ID NO: 3029 - DNA, 20 bp, Homo sapiens
gccgccggccgtgcacccct

SEQ ID NO: 3030 - DNA, 20 bp, Homo sapiens
agccgccggccgtgcacccc

SEQ ID NO: 3031 - DNA, 20 bp, Homo sapiens
tcctgcagcccaggggtgca

SEQ ID NO: 3032 - DNA, 20 bp, Homo sapiens
gcagcccaggggtgcacggc

SEQ ID NO: 3033 - DNA, 20 bp, Homo sapiens
gcccaggggtgcacggccgg

SEQ ID NO: 3034 - DNA, 20 bp, Homo sapiens
acgggggctgggggagccgc

SEQ ID NO: 3035 - DNA, 20 bp, Homo sapiens
ggcaggcggacgggggctgg

SEQ ID NO: 3036 - DNA, 20 bp, Homo sapiens
aggcaggcggacgggggctg

SEQ ID NO: 3037 - DNA, 20 bp, Homo sapiens
aaggcaggcggacgggggct

SEQ ID NO: 3038 - DNA, 20 bp, Homo sapiens
caaggcaggcggacgggggc

SEQ ID NO: 3039 - DNA, 20 bp, Homo sapiens
tctgcaaggcaggcggacgg

SEQ ID NO: 3040 - DNA, 20 bp, Homo sapiens
atctgcaaggcaggcggacg

SEQ ID NO: 3041 - DNA, 20 bp, Homo sapiens
tatctgcaaggcaggcggac

SEQ ID NO: 3042 - DNA, 20 bp, Homo sapiens
gtatctgcaaggcaggcgga

SEQ ID NO: 3043 - DNA, 20 bp, Homo sapiens
ccacgtatctgcaaggcagg

SEQ ID NO: 3044 - DNA, 20 bp, Homo sapiens
aagccacgtatctgcaaggc

SEQ ID NO: 3045 - DNA, 20 bp, Homo sapiens
aggaaagccacgtatctgca

SEQ ID NO: 3046 - DNA, 20 bp, Homo sapiens
ccgcctgccttgcagatacg

SEQ ID NO: 3047 - DNA, 20 bp, Homo sapiens
ccgtctccaggaacagcttc

SEQ ID NO: 3048 - DNA, 20 bp, Homo sapiens
ggctttcctgaagctgttcc

SEQ ID NO: 3049 - DNA, 20 bp, Homo sapiens
cctgaagctgttcctggaga

SEQ ID NO: 3050 - DNA, 20 bp, Homo sapiens
agtgcttctccgccgtctcc

SEQ ID NO: 3051 - DNA, 20 bp, Homo sapiens
gaagctgttcctggagacgg

SEQ ID NO: 3052 - DNA, 20 bp, Homo sapiens
gacggcggagaagcacttca

SEQ ID NO: 3053 - DNA, 20 bp, Homo sapiens
ggcggagaagcacttcatgg

SEQ ID NO: 3054 - DNA, 20 bp, Homo sapiens
gcggagaagcacttcatggt

SEQ ID NO: 3055 - DNA, 20 bp, Homo sapiens
agacatagtagtggacacgg

SEQ ID NO: 3056 - DNA, 20 bp, Homo sapiens
tgaagacatagtagtggaca

SEQ ID NO: 3057 - DNA, 20 bp, Homo sapiens
ggtcggtgaagacatagtag

SEQ ID NO: 3058 - DNA, 20 bp, Homo sapiens
ctatgtcttcaccgaccagc

SEQ ID NO: 3059 - DNA, 20 bp, Homo sapiens
gggcaccgcggccggctggt

SEQ ID NO: 3060 - DNA, 20 bp, Homo sapiens
cgcggggcaccgcggccggc

SEQ ID NO: 3061 - DNA, 20 bp, Homo sapiens
cttcaccgaccagccggccg

SEQ ID NO: 3062 - DNA, 20 bp, Homo sapiens
gtcacgcggggcaccgcggc

SEQ ID NO: 3063 - DNA, 20 bp, Homo sapiens
cagcgtcacgcggggcaccg

SEQ ID NO: 3064 - DNA, 20 bp, Homo sapiens
ccggtccccagcgtcacgcg

SEQ ID NO: 3065 - DNA, 20 bp, Homo sapiens
accggtccccagcgtcacgc

SEQ ID NO: 3066 - DNA, 20 bp, Homo sapiens
gaccggtccccagcgtcacg

SEQ ID NO: 3067 - DNA, 20 bp, Homo sapiens
cgcggtgccccgcgtgacgc

SEQ ID NO: 3068 - DNA, 20 bp, Homo sapiens
gcggtgccccgcgtgacgct

SEQ ID NO: 3069 - DNA, 20 bp, Homo sapiens
cggtgccccgcgtgacgctg

SEQ ID NO: 3070 - DNA, 20 bp, Homo sapiens
ccccgcgtgacgctggggac

SEQ ID NO: 3071 - DNA, 20 bp, Homo sapiens
gcgtgacgctggggaccggt

SEQ ID NO: 3072 - DNA, 20 bp, Homo sapiens
cagcactgacagctgccgac

SEQ ID NO: 3073 - DNA, 20 bp, Homo sapiens
cggtcggcagctgtcagtgc

SEQ ID NO: 3074 - DNA, 20 bp, Homo sapiens
tcggcagctgtcagtgctgg

SEQ ID NO: 3075 - DNA, 20 bp, Homo sapiens
cacgtcctgccagcgcttgt

SEQ ID NO: 3076 - DNA, 20 bp, Homo sapiens
aggtgcgcgcctacaagcgc

SEQ ID NO: 3077 - DNA, 20 bp, Homo sapiens
gcgcgcctacaagcgctggc

SEQ ID NO: 3078 - DNA, 20 bp, Homo sapiens
gatcatctccatgcggcgca

SEQ ID NO: 3079 - DNA, 20 bp, Homo sapiens
ggacgtgtccatgcgccgca

SEQ ID NO: 3080 - DNA, 20 bp, Homo sapiens
agtcactgatcatctccatg

SEQ ID NO: 3081 - DNA, 20 bp, Homo sapiens
tgatcagtgacttctgcgag

SEQ ID NO: 3082 - DNA, 20 bp, Homo sapiens
cgagcggcgcttcctcagcg

SEQ ID NO: 3083 - DNA, 20 bp, Homo sapiens
ccaggtaatccacctcgctg

SEQ ID NO: 3084 - DNA, 20 bp, Homo sapiens
gcggcgcttcctcagcgagg

SEQ ID NO: 3085 - DNA, 20 bp, Homo sapiens
cctcagcgaggtggattacc

SEQ ID NO: 3086 - DNA, 20 bp, Homo sapiens
tgtccacgtccacgcacacc

SEQ ID NO: 3087 - DNA, 20 bp, Homo sapiens
ggtggattacctggtgtgcg

SEQ ID NO: 3088 - DNA, 20 bp, Homo sapiens
ttacctggtgtgcgtggacg

SEQ ID NO: 3089 - DNA, 20 bp, Homo sapiens
ggtgtgcgtggacgtggaca

SEQ ID NO: 3090 - DNA, 20 bp, Homo sapiens
tctccacgcccacgtggtcg

SEQ ID NO: 3091 - DNA, 20 bp, Homo sapiens
catggagttccgcgaccacg

SEQ ID NO: 3092 - DNA, 20 bp, Homo sapiens
atggagttccgcgaccacgt

SEQ ID NO: 3093 - DNA, 20 bp, Homo sapiens
tcaggatctccacgcccacg

SEQ ID NO: 3094 - DNA, 20 bp, Homo sapiens
gttccgcgaccacgtgggcg

SEQ ID NO: 3095 - DNA, 20 bp, Homo sapiens
gggtgccgaacagcggagtc

SEQ ID NO: 3096 - DNA, 20 bp, Homo sapiens
gagatcctgactccgctgtt

SEQ ID NO: 3097 - DNA, 20 bp, Homo sapiens
gggtgcagggtgccgaacag

SEQ ID NO: 3098 - DNA, 20 bp, Homo sapiens
tccgtagaagccggggtgca

SEQ ID NO: 3099 - DNA, 20 bp, Homo sapiens
ctgttcggcaccctgcaccc

SEQ ID NO: 3100 - DNA, 20 bp, Homo sapiens
ttccgtagaagccggggtgc

SEQ ID NO: 3101 - DNA, 20 bp, Homo sapiens
ggctgcttccgtagaagccg

SEQ ID NO: 3102 - DNA, 20 bp, Homo sapiens
cggctgcttccgtagaagcc

SEQ ID NO: 3103 - DNA, 20 bp, Homo sapiens
ccggctgcttccgtagaagc

SEQ ID NO: 3104 - DNA, 20 bp, Homo sapiens
accctgcaccccggcttcta

SEQ ID NO: 3105 - DNA, 20 bp, Homo sapiens
ccggcttctacggaagcagc

SEQ ID NO: 3106 - DNA, 20 bp, Homo sapiens
cggcttctacggaagcagcc

SEQ ID NO: 3107 - DNA, 20 bp, Homo sapiens
cttctacggaagcagccggg

SEQ ID NO: 3108 - DNA, 20 bp, Homo sapiens
gctcgtaggtgaaggcctcc

SEQ ID NO: 3109 - DNA, 20 bp, Homo sapiens
gggccggcgctcgtaggtga

SEQ ID NO: 3110 - DNA, 20 bp, Homo sapiens
ggactggggccggcgctcgt

SEQ ID NO: 3111 - DNA, 20 bp, Homo sapiens
aggccttcacctacgagcgc

SEQ ID NO: 3112 - DNA, 20 bp, Homo sapiens
tgtaggcctgggactggggc

SEQ ID NO: 3113 - DNA, 20 bp, Homo sapiens
gggatgtaggcctgggactg

SEQ ID NO: 3114 - DNA, 20 bp, Homo sapiens
cgagcgccggccccagtccc

SEQ ID NO: 3115 - DNA, 20 bp, Homo sapiens
ggggatgtaggcctgggact

SEQ ID NO: 3116 - DNA, 20 bp, Homo sapiens
tggggatgtaggcctgggac

SEQ ID NO: 3117 - DNA, 20 bp, Homo sapiens
gtccttggggatgtaggcct

SEQ ID NO: 3118 - DNA, 20 bp, Homo sapiens
cgtccttggggatgtaggcc

SEQ ID NO: 3119 - DNA, 20 bp, Homo sapiens
gccctcgtccttggggatgt

SEQ ID NO: 3120 - DNA, 20 bp, Homo sapiens
gtcccaggcctacatcccca

SEQ ID NO: 3121 - DNA, 20 bp, Homo sapiens
agaaatcgccctcgtccttg

SEQ ID NO: 3122 - DNA, 20 bp, Homo sapiens
tagaaatcgccctcgtcctt

SEQ ID NO: 3123 - DNA, 20 bp, Homo sapiens
ggcctacatccccaaggacg

SEQ ID NO: 3124 - DNA, 20 bp, Homo sapiens
gtagaaatcgccctcgtcct

SEQ ID NO: 3125 - DNA, 20 bp, Homo sapiens
gcctacatccccaaggacga

SEQ ID NO: 3126 - DNA, 20 bp, Homo sapiens
cgagggcgatttctactacc

SEQ ID NO: 3127 - DNA, 20 bp, Homo sapiens
gagggcgatttctactacct

SEQ ID NO: 3128 - DNA, 20 bp, Homo sapiens
agggcgatttctactacctg

SEQ ID NO: 3129 - DNA, 20 bp, Homo sapiens
gggcgatttctactacctgg

SEQ ID NO: 3130 - DNA, 20 bp, Homo sapiens
ggcgatttctactacctggg

SEQ ID NO: 3131 - DNA, 20 bp, Homo sapiens
gcgatttctactacctgggg

SEQ ID NO: 3132 - DNA, 20 bp, Homo sapiens
accccccgaagaaccccccc

SEQ ID NO: 3133 - DNA, 20 bp, Homo sapiens
tactacctgggggggttctt

SEQ ID NO: 3134 - DNA, 20 bp, Homo sapiens
actacctgggggggttcttc

SEQ ID NO: 3135 - DNA, 20 bp, Homo sapiens
ctacctgggggggttcttcg

SEQ ID NO: 3136 - DNA, 20 bp, Homo sapiens
tacctgggggggttcttcgg

SEQ ID NO: 3137 - DNA, 20 bp, Homo sapiens
acctgggggggttcttcggg

SEQ ID NO: 3138 - DNA, 20 bp, Homo sapiens
gggggggttcttcggggggt

SEQ ID NO: 3139 - DNA, 20 bp, Homo sapiens
cttcggggggtcggtgcaag

SEQ ID NO: 3140 - DNA, 20 bp, Homo sapiens
ggtcggtgcaagaggtgcag

SEQ ID NO: 3141 - DNA, 20 bp, Homo sapiens
aagaggtgcagcggctcacc

SEQ ID NO: 3142 - DNA, 20 bp, Homo sapiens
agaggtgcagcggctcacca

SEQ ID NO: 3143 - DNA, 20 bp, Homo sapiens
catggcctggtggcaggccc

SEQ ID NO: 3144 - DNA, 20 bp, Homo sapiens
gctcaccagggcctgccacc

SEQ ID NO: 3145 - DNA, 20 bp, Homo sapiens
gaccatcatggcctggtggc

SEQ ID NO: 3146 - DNA, 20 bp, Homo sapiens
ggtcgaccatcatggcctgg

SEQ ID NO: 3147 - DNA, 20 bp, Homo sapiens
cctggtcgaccatcatggcc

SEQ ID NO: 3148 - DNA, 20 bp, Homo sapiens
ggcctgccaccaggccatga

SEQ ID NO: 3149 - DNA, 20 bp, Homo sapiens
gttggcctggtcgaccatca

SEQ ID NO: 3150 - DNA, 20 bp, Homo sapiens
ccaggccatgatggtcgacc

SEQ ID NO: 3151 - DNA, 20 bp, Homo sapiens
atgatggtcgaccaggccaa

SEQ ID NO: 3152 - DNA, 20 bp, Homo sapiens
cggcctcgatgccgttggcc

SEQ ID NO: 3153 - DNA, 20 bp, Homo sapiens
ccacacggcctcgatgccgt

SEQ ID NO: 3154 - DNA, 20 bp, Homo sapiens
cgaccaggccaacggcatcg

SEQ ID NO: 3155 - DNA, 20 bp, Homo sapiens
ccaacggcatcgaggccgtg

SEQ ID NO: 3156 - DNA, 20 bp, Homo sapiens
gtggctctcgtcgtgccaca

SEQ ID NO: 3157 - DNA, 20 bp, Homo sapiens
gcagcaggtacttgttcagg

SEQ ID NO: 3158 - DNA, 20 bp, Homo sapiens
ggcgcagcaggtacttgttc

SEQ ID NO: 3159 - DNA, 20 bp, Homo sapiens
tggtgggtttgtggcgcagc

SEQ ID NO: 3160 - DNA, 20 bp, Homo sapiens
agagcaccttggtgggtttg

SEQ ID NO: 3161 - DNA, 20 bp, Homo sapiens
gctgcgccacaaacccacca

SEQ ID NO: 3162 - DNA, 20 bp, Homo sapiens
tcgggggagagcaccttggt

SEQ ID NO: 3163 - DNA, 20 bp, Homo sapiens
ctcgggggagagcaccttgg

SEQ ID NO: 3164 - DNA, 20 bp, Homo sapiens
gtactcgggggagagcacct

SEQ ID NO: 3165 - DNA, 20 bp, Homo sapiens
ctggtcccacaagtactcgg

SEQ ID NO: 3166 - DNA, 20 bp, Homo sapiens
gctggtcccacaagtactcg

SEQ ID NO: 3167 - DNA, 20 bp, Homo sapiens
tgctggtcccacaagtactc

SEQ ID NO: 3168 - DNA, 20 bp, Homo sapiens
ctgctggtcccacaagtact

SEQ ID NO: 3169 - DNA, 20 bp, Homo sapiens
tgctctcccccgagtacttg

SEQ ID NO: 3170 - DNA, 20 bp, Homo sapiens
gctctcccccgagtacttgt

SEQ ID NO: 3171 - DNA, 20 bp, Homo sapiens
cgggccagcccagcagctgc

SEQ ID NO: 3172 - DNA, 20 bp, Homo sapiens
cttgtgggaccagcagctgc

SEQ ID NO: 3173 - DNA, 20 bp, Homo sapiens
ttgtgggaccagcagctgct

SEQ ID NO: 3174 - DNA, 20 bp, Homo sapiens
gggaccagcagctgctgggc

SEQ ID NO: 3175 - DNA, 20 bp, Homo sapiens
ctcagcttcctcaggacggc

SEQ ID NO: 3176 - DNA, 20 bp, Homo sapiens
cctcagcttcctcaggacgg

SEQ ID NO: 3177 - DNA, 20 bp, Homo sapiens
tgggctggcccgccgtcctg

SEQ ID NO: 3178 - DNA, 20 bp, Homo sapiens
gaacctcagcttcctcagga

SEQ ID NO: 3179 - DNA, 20 bp, Homo sapiens
cagtgaacctcagcttcctc

SEQ ID NO: 3180 - DNA, 20 bp, Homo sapiens
ccgccgtcctgaggaagctg

SEQ ID NO: 3181 - DNA, 20 bp, Homo sapiens
gaggaagctgaggttcactg

SEQ ID NO: 3182 - DNA, 20 bp, Homo sapiens
cggaccgcctggtggttctt

SEQ ID NO: 3183 - DNA, 20 bp, Homo sapiens
ccggaccgcctggtggttct

SEQ ID NO: 3184 - DNA, 20 bp, Homo sapiens
tgcggtgcccaagaaccacc

SEQ ID NO: 3185 - DNA, 20 bp, Homo sapiens
ggtgcccaagaaccaccagg

SEQ ID NO: 3186 - DNA, 20 bp, Homo sapiens
acgggttccggaccgcctgg

SEQ ID NO: 3187 - DNA, 20 bp, Homo sapiens
ctcacgggttccggaccgcc

SEQ ID NO: 3188 - DNA, 20 bp, Homo sapiens
ccaagaaccaccaggcggtc

SEQ ID NO: 3189 - DNA, 20 bp, Homo sapiens
tggcagccgctcacgggttc

SEQ ID NO: 3190 - DNA, 20 bp, Homo sapiens
ggcggtccggaacccgtgag

SEQ ID NO: 3191 - DNA, 20 bp, Homo sapiens
agcccctggcagccgctcac

SEQ ID NO: 3192 - DNA, 20 bp, Homo sapiens
gagcccctggcagccgctca

SEQ ID NO: 3193 - DNA, 20 bp, Homo sapiens
ggaacccgtgagcggctgcc

SEQ ID NO: 3194 - DNA, 20 bp, Homo sapiens
gaacccgtgagcggctgcca

SEQ ID NO: 3195 - DNA, 20 bp, Homo sapiens
aacccgtgagcggctgccag

SEQ ID NO: 3196 - DNA, 20 bp, Homo sapiens
ggcagccctcccagagcccc

SEQ ID NO: 3197 - DNA, 20 bp, Homo sapiens
tgagcggctgccaggggctc

SEQ ID NO: 3198 - DNA, 20 bp, Homo sapiens
gagcggctgccaggggctct

SEQ ID NO: 3199 - DNA, 20 bp, Homo sapiens
cggctgccaggggctctggg

SEQ ID NO: 3200 - DNA, 20 bp, Homo sapiens
ggctgccaggggctctggga

SEQ ID NO: 3201 - DNA, 20 bp, Homo sapiens
aggggctctgggagggctgc

SEQ ID NO: 3202 - DNA, 20 bp, Homo sapiens
cgggagggggacggggctgc

SEQ ID NO: 3203 - DNA, 20 bp, Homo sapiens
ccaagggcgggagggggacg

SEQ ID NO: 3204 - DNA, 20 bp, Homo sapiens
accaagggcgggagggggac

SEQ ID NO: 3205 - DNA, 20 bp, Homo sapiens
aaccaagggcgggaggggga

SEQ ID NO: 3206 - DNA, 20 bp, Homo sapiens
ctaaaaccaagggcgggagg

SEQ ID NO: 3207 - DNA, 20 bp, Homo sapiens
gctaaaaccaagggcgggag

SEQ ID NO: 3208 - DNA, 20 bp, Homo sapiens
tgctaaaaccaagggcggga

SEQ ID NO: 3209 - DNA, 20 bp, Homo sapiens
ctgctaaaaccaagggcggg

SEQ ID NO: 3210 - DNA, 20 bp, Homo sapiens
ccccgtccccctcccgccct

SEQ ID NO: 3211 - DNA, 20 bp, Homo sapiens
gttctgctaaaaccaagggc

SEQ ID NO: 3212 - DNA, 20 bp, Homo sapiens
cgttctgctaaaaccaaggg

SEQ ID NO: 3213 - DNA, 20 bp, Homo sapiens
acccgttctgctaaaaccaa

SEQ ID NO: 3214 - DNA, 20 bp, Homo sapiens
tacccgttctgctaaaacca

SEQ ID NO: 3215 - DNA, 20 bp, Homo sapiens
cgcccttggttttagcagaa

SEQ ID NO: 3216 - DNA, 20 bp, Homo sapiens
gcccttggttttagcagaac

SEQ ID NO: 3217 - DNA, 20 bp, Homo sapiens
actcacaacaggacggacaa

SEQ ID NO: 3218 - DNA, 20 bp, Homo sapiens
ttcagttactcacaacagga

SEQ ID NO: 3219 - DNA, 20 bp, Homo sapiens
aggcttcagttactcacaac

SEQ ID NO: 3220 - DNA, 20 bp, Homo sapiens
gttgtgagtaactgaagcct

SEQ ID NO: 3221 - DNA, 20 bp, Homo sapiens
ttgaggtggggacggggcct

SEQ ID NO: 3222 - DNA, 20 bp, Homo sapiens
tgtgatttgaggtggggacg

SEQ ID NO: 3223 - DNA, 20 bp, Homo sapiens
gtgtgatttgaggtggggac

SEQ ID NO: 3224 - DNA, 20 bp, Homo sapiens
tgtgtgatttgaggtgggga

SEQ ID NO: 3225 - DNA, 20 bp, Homo sapiens
ggtgtgtgtgatttgaggtg

SEQ ID NO: 3226 - DNA, 20 bp, Homo sapiens
gggtgtgtgtgatttgaggt

SEQ ID NO: 3227 - DNA, 20 bp, Homo sapiens
ggggtgtgtgtgatttgagg

SEQ ID NO: 3228 - DNA, 20 bp, Homo sapiens
gagggggtgtgtgtgatttg

SEQ ID NO: 3229 - DNA, 20 bp, Homo sapiens
gtgtctctgtggtggggagg

SEQ ID NO: 3230 - DNA, 20 bp, Homo sapiens
ggtgtctctgtggtggggag

SEQ ID NO: 3231 - DNA, 20 bp, Homo sapiens
tggtgtctctgtggtgggga

SEQ ID NO: 3232 - DNA, 20 bp, Homo sapiens
atggtgtctctgtggtgggg

SEQ ID NO: 3233 - DNA, 20 bp, Homo sapiens
gtaatggtgtctctgtggtg

SEQ ID NO: 3234 - DNA, 20 bp, Homo sapiens
tgtaatggtgtctctgtggt

SEQ ID NO: 3235 - DNA, 20 bp, Homo sapiens
atgtaatggtgtctctgtgg

SEQ ID NO: 3236 - DNA, 20 bp, Homo sapiens
tgtatgtaatggtgtctctg

SEQ ID NO: 3237 - DNA, 20 bp, Homo sapiens
gtgtgtgtctgtgtatgtaa

SEQ ID NO: 3238 - DNA, 20 bp, Homo sapiens
tggtgtctctgtggcgggga

SEQ ID NO: 3239 - DNA, 20 bp, Homo sapiens
atggtgtctctgtggcgggg

SEQ ID NO: 3240 - DNA, 20 bp, Homo sapiens
gtaatggtgtctctgtggcg

SEQ ID NO: 3241 - DNA, 20 bp, Homo sapiens
tgtaatggtgtctctgtggc

SEQ ID NO: 3242 - DNA, 20 bp, Homo sapiens
atgtaatggtgtctctgtgg

SEQ ID NO: 3243 - DNA, 20 bp, Homo sapiens
tgtatgtaatggtgtctctg

SEQ ID NO: 3244 - DNA, 20 bp, Homo sapiens
gtgtgtgtctgtgtatgtaa

SEQ ID NO: 3245 - DNA, 20 bp, Homo sapiens
gtgtgtctctgtggcgggga

SEQ ID NO: 3246 - DNA, 20 bp, Homo sapiens
ggtgtgtctctgtggcgggg

SEQ ID NO: 3247 - DNA, 20 bp, Homo sapiens
aatggtgtgtctctgtggcg

SEQ ID NO: 3248 - DNA, 20 bp, Homo sapiens
taatggtgtgtctctgtggc

SEQ ID NO: 3249 - DNA, 20 bp, Homo sapiens
gtaatggtgtgtctctgtgg

SEQ ID NO: 3250 - DNA, 20 bp, Homo sapiens
tatgtaatggtgtgtctctg

SEQ ID NO: 3251 - DNA, 20 bp, Homo sapiens
ttgcgtgtctgtgtatgtaa

SEQ ID NO: 3252 - DNA, 20 bp, Homo sapiens
caatcgcagatacgcccttc

SEQ ID NO: 3253 - DNA, 20 bp, Homo sapiens
gtgtgtttctgtggccggaa

SEQ ID NO: 3254 - DNA, 20 bp, Homo sapiens
ggtgtgtttctgtggccgga

SEQ ID NO: 3255 - DNA, 20 bp, Homo sapiens
taatggtgtgtttctgtggc

SEQ ID NO: 3256 - DNA, 20 bp, Homo sapiens
tgtgtaatggtgtgtttctg

SEQ ID NO: 3257 - DNA, 20 bp, Homo sapiens
ttctgtgtatgtgtgtgtaa

SEQ ID NO: 3258 - DNA, 20 bp, Homo sapiens
gtgtgtgtctgtgtatgtaa

SEQ ID NO: 3259 - DNA, 20 bp, Homo sapiens
gtgtgtctctgtggcgggga

SEQ ID NO: 3260 - DNA, 20 bp, Homo sapiens
ggtgtgtctctgtggcgggg

SEQ ID NO: 3261 - DNA, 20 bp, Homo sapiens
aatggtgtgtctctgtggcg

SEQ ID NO: 3262 - DNA, 20 bp, Homo sapiens
taatggtgtgtctctgtggc

SEQ ID NO: 3263 - DNA, 20 bp, Homo sapiens
gtaatggtgtgtctctgtgg

SEQ ID NO: 3264 - DNA, 20 bp, Homo sapiens
tatgtaatggtgtgtctctg

SEQ ID NO: 3265 - DNA, 20 bp, Homo sapiens
gtgtgtgtctgtgtatgtaa

SEQ ID NO: 3266 - DNA, 20 bp, Homo sapiens
tgtgtctctgtggcggggag

SEQ ID NO: 3267 - DNA, 20 bp, Homo sapiens
gtgtgtctctgtggcgggga

SEQ ID NO: 3268 - DNA, 20 bp, Homo sapiens
ggtgtgtctctgtggcgggg

SEQ ID NO: 3269 - DNA, 20 bp, Homo sapiens
aatggtgtgtctctgtggcg

SEQ ID NO: 3270 - DNA, 20 bp, Homo sapiens
taatggtgtgtctctgtggc

SEQ ID NO: 3271 - DNA, 20 bp, Homo sapiens
gtaatggtgtgtctctgtgg

SEQ ID NO: 3272 - DNA, 20 bp, Homo sapiens
tatgtaatggtgtgtctctg

SEQ ID NO: 3273 - DNA, 20 bp, Homo sapiens
gtgtgtgtctgtgtatgtaa

SEQ ID NO: 3274 - DNA, 20 bp, Homo sapiens
caatcacagataccccctcc

SEQ ID NO: 3275 - DNA, 20 bp, Homo sapiens
gtgtctctatggccgggagg

SEQ ID NO: 3276 - DNA, 20 bp, Homo sapiens
tgtgtctctatggccgggag

SEQ ID NO: 3277 - DNA, 20 bp, Homo sapiens
gtgtgtctctatggccggga

SEQ ID NO: 3278 - DNA, 20 bp, Homo sapiens
ggtgtgtctctatggccggg

SEQ ID NO: 3279 - DNA, 20 bp, Homo sapiens
aacggtgtgtctctatggcc

SEQ ID NO: 3280 - DNA, 20 bp, Homo sapiens
taacggtgtgtctctatggc

SEQ ID NO: 3281 - DNA, 20 bp, Homo sapiens
tgtgtaacggtgtgtctcta

SEQ ID NO: 3282 - DNA, 20 bp, Homo sapiens
ttctgtgtatgtgtgtgtaa

SEQ ID NO: 3283 - DNA, 20 bp, Homo sapiens
tgtgtctctgtggcggggag

SEQ ID NO: 3284 - DNA, 20 bp, Homo sapiens
gtgtgtctctgtggcgggga

SEQ ID NO: 3285 - DNA, 20 bp, Homo sapiens
ggtgtgtctctgtggcgggg

SEQ ID NO: 3286 - DNA, 20 bp, Homo sapiens
aatggtgtgtctctgtggcg

SEQ ID NO: 3287 - DNA, 20 bp, Homo sapiens
taatggtgtgtctctgtggc

SEQ ID NO: 3288 - DNA, 20 bp, Homo sapiens
gtaatggtgtgtctctgtgg

SEQ ID NO: 3289 - DNA, 20 bp, Homo sapiens
tatgtaatggtgtgtctctg

SEQ ID NO: 3290 - DNA, 20 bp, Homo sapiens
gtgtgtgtctgtgtatgtaa

SEQ ID NO: 3291 - DNA, 20 bp, Homo sapiens
cggtgtgtctctgtggcggg

SEQ ID NO: 3292 - DNA, 20 bp, Homo sapiens
acggtgtgtctctgtggcgg

SEQ ID NO: 3293 - DNA, 20 bp, Homo sapiens
aacggtgtgtctctgtggcg

SEQ ID NO: 3294 - DNA, 20 bp, Homo sapiens
taacggtgtgtctctgtggc

SEQ ID NO: 3295 - DNA, 20 bp, Homo sapiens
gtaacggtgtgtctctgtgg

SEQ ID NO: 3296 - DNA, 20 bp, Homo sapiens
tatgtaacggtgtgtctctg

SEQ ID NO: 3297 - DNA, 20 bp, Homo sapiens
gtgtatgtctgtgtatgtaa

SEQ ID NO: 3298 - DNA, 20 bp, Homo sapiens
tctgtgtgtctttgcgtgtc

SEQ ID NO: 3299 - DNA, 20 bp, Homo sapiens
cagacatgcacagagacaca

SEQ ID NO: 3300 - DNA, 20 bp, Homo sapiens
tgcatgtctgtgtgtctgtg

SEQ ID NO: 3301 - DNA, 20 bp, Homo sapiens
agactcacgcacacagactt

SEQ ID NO: 3302 - DNA, 20 bp, Homo sapiens
atgccccaggcgctgaattt

SEQ ID NO: 3303 - DNA, 20 bp, Homo sapiens
tatgccccaggcgctgaatt

SEQ ID NO: 3304 - DNA, 20 bp, Homo sapiens
ggcagcccaaattcagcgcc

SEQ ID NO: 3305 - DNA, 20 bp, Homo sapiens
gcagcccaaattcagcgcct

SEQ ID NO: 3306 - DNA, 20 bp, Homo sapiens
cagcccaaattcagcgcctg

SEQ ID NO: 3307 - DNA, 20 bp, Homo sapiens
cctccaggaacttatgcccc

SEQ ID NO: 3308 - DNA, 20 bp, Homo sapiens
gcgcctggggcataagttcc

SEQ ID NO: 3309 - DNA, 20 bp, Homo sapiens
cctggggcataagttcctgg

SEQ ID NO: 3310 - DNA, 20 bp, Homo sapiens
ctggggcataagttcctgga

SEQ ID NO: 3311 - DNA, 20 bp, Homo sapiens
tggggcataagttcctggag

SEQ ID NO: 3312 - DNA, 20 bp, Homo sapiens
ctgaaggtggccacccctcc

SEQ ID NO: 3313 - DNA, 20 bp, Homo sapiens
ggcataagttcctggagggg

SEQ ID NO: 3314 - DNA, 20 bp, Homo sapiens
cttaccgtgggggctgaagg

SEQ ID NO: 3315 - DNA, 20 bp, Homo sapiens
gaccttaccgtgggggctga

SEQ ID NO: 3316 - DNA, 20 bp, Homo sapiens
gtggccaccttcagccccca

SEQ ID NO: 3317 - DNA, 20 bp, Homo sapiens
tcctcaggaccttaccgtgg

SEQ ID NO: 3318 - DNA, 20 bp, Homo sapiens
ttcctcaggaccttaccgtg

SEQ ID NO: 3319 - DNA, 20 bp, Homo sapiens
caccttcagcccccacggta

SEQ ID NO: 3320 - DNA, 20 bp, Homo sapiens
gttcctcaggaccttaccgt

SEQ ID NO: 3321 - DNA, 20 bp, Homo sapiens
ggttcctcaggaccttaccg

SEQ ID NO: 3322 - DNA, 20 bp, Homo sapiens
gcccccacggtaaggtcctg

SEQ ID NO: 3323 - DNA, 20 bp, Homo sapiens
gtctaaggggaaggttcctc

SEQ ID NO: 3324 - DNA, 20 bp, Homo sapiens
tgatcccttgtctaagggga

SEQ ID NO: 3325 - DNA, 20 bp, Homo sapiens
tccatgatcccttgtctaag

SEQ ID NO: 3326 - DNA, 20 bp, Homo sapiens
ctccatgatcccttgtctaa

SEQ ID NO: 3327 - DNA, 20 bp, Homo sapiens
aggaaccttccccttagaca

SEQ ID NO: 3328 - DNA, 20 bp, Homo sapiens
cctccatgatcccttgtcta

SEQ ID NO: 3329 - DNA, 20 bp, Homo sapiens
ggaaccttccccttagacaa

SEQ ID NO: 3330 - DNA, 20 bp, Homo sapiens
tccccttagacaagggatca

SEQ ID NO: 3331 - DNA, 20 bp, Homo sapiens
ccttagacaagggatcatgg

SEQ ID NO: 3332 - DNA, 20 bp, Homo sapiens
tagacaagggatcatggagg

SEQ ID NO: 3333 - DNA, 20 bp, Homo sapiens
atcatggaggaggtctcttc

SEQ ID NO: 3334 - DNA, 20 bp, Homo sapiens
aggaggtctcttccggagcc

SEQ ID NO: 3335 - DNA, 20 bp, Homo sapiens
tgaggcctccctccaggctc

SEQ ID NO: 3336 - DNA, 20 bp, Homo sapiens
aggtctcttccggagcctgg

SEQ ID NO: 3337 - DNA, 20 bp, Homo sapiens
ggtctcttccggagcctgga

SEQ ID NO: 3338 - DNA, 20 bp, Homo sapiens
ctcttccggagcctggaggg

SEQ ID NO: 3339 - DNA, 20 bp, Homo sapiens
accacttgaggcctccctcc

SEQ ID NO: 3340 - DNA, 20 bp, Homo sapiens
gcctggagggaggcctcaag

SEQ ID NO: 3341 - DNA, 20 bp, Homo sapiens
cgaggtggaaggaccacttg

SEQ ID NO: 3342 - DNA, 20 bp, Homo sapiens
ctttgggatgccgaggtgga

SEQ ID NO: 3343 - DNA, 20 bp, Homo sapiens
ctcaagtggtccttccacct

SEQ ID NO: 3344 - DNA, 20 bp, Homo sapiens
agcactttgggatgccgagg

SEQ ID NO: 3345 - DNA, 20 bp, Homo sapiens
cctagcactttgggatgccg

SEQ ID NO: 3346 - DNA, 20 bp, Homo sapiens
gcttataatcctagcacttt

SEQ ID NO: 3347 - DNA, 20 bp, Homo sapiens
tgcttataatcctagcactt

SEQ ID NO: 3348 - DNA, 20 bp, Homo sapiens
cctcggcatcccaaagtgct

SEQ ID NO: 3349 - DNA, 20 bp, Homo sapiens
gatgttggggccaggtgcag

SEQ ID NO: 3350 - DNA, 20 bp, Homo sapiens
taagcatgagccactgcacc

SEQ ID NO: 3351 - DNA, 20 bp, Homo sapiens
caataaatgatgttggggcc

SEQ ID NO: 3352 - DNA, 20 bp, Homo sapiens
ctgttcaataaatgatgttg

SEQ ID NO: 3353 - DNA, 20 bp, Homo sapiens
tctgttcaataaatgatgtt

SEQ ID NO: 3354 - DNA, 20 bp, Homo sapiens
gtctgttcaataaatgatgt

SEQ ID NO: 3355 - DNA, 20 bp, Homo sapiens
aaatgccaagaaacacaatg

SEQ ID NO: 3356 - DNA, 20 bp, Homo sapiens
cgtttccacattgtgtttct

SEQ ID NO: 3357 - DNA, 20 bp, Homo sapiens
gaagtgaatccatgcattta

SEQ ID NO: 3358 - DNA, 20 bp, Homo sapiens
atcagttgaccgtaaatgca

SEQ ID NO: 3359 - DNA, 20 bp, Homo sapiens
taaatgcatggattcacttc

SEQ ID NO: 3360 - DNA, 20 bp, Homo sapiens
aaatgcatggattcacttcc

SEQ ID NO: 3361 - DNA, 20 bp, Homo sapiens
atgaaacagaatagagagcc

SEQ ID NO: 3362 - DNA, 20 bp, Homo sapiens
ggctctctattctgtttcat

SEQ ID NO: 3363 - DNA, 20 bp, Homo sapiens
taatcaaaacatcatggtat

SEQ ID NO: 3364 - DNA, 20 bp, Homo sapiens
ctataataatcaaaacatca

SEQ ID NO: 3365 - DNA, 20 bp, Homo sapiens
ttatagtatatcttgaagtt

SEQ ID NO: 3366 - DNA, 20 bp, Homo sapiens
ttaagcaaaaagaacaaagc

SEQ ID NO: 3367 - DNA, 20 bp, Homo sapiens
ctttttgcttaagattgctt

SEQ ID NO: 3368 - DNA, 20 bp, Homo sapiens
taagattgctttggctattt

SEQ ID NO: 3369 - DNA, 20 bp, Homo sapiens
aagattgctttggctattta

SEQ ID NO: 3370 - DNA, 20 bp, Homo sapiens
agattgctttggctatttag

SEQ ID NO: 3371 - DNA, 20 bp, Homo sapiens
tggctatttaggggtctttg

SEQ ID NO: 3372 - DNA, 20 bp, Homo sapiens
gccattttaactgtcagtaa

SEQ ID NO: 3373 - DNA, 20 bp, Homo sapiens
gccattactgacagttaaaa

SEQ ID NO: 3374 - DNA, 20 bp, Homo sapiens
actgacagttaaaatggccc

SEQ ID NO: 3375 - DNA, 20 bp, Homo sapiens
ggcccaggagacatgagcca

SEQ ID NO: 3376 - DNA, 20 bp, Homo sapiens
aggcccaggagacatgagcc

SEQ ID NO: 3377 - DNA, 20 bp, Homo sapiens
tggccctggctcatgtctcc

SEQ ID NO: 3378 - DNA, 20 bp, Homo sapiens
ggccctggctcatgtctcct

SEQ ID NO: 3379 - DNA, 20 bp, Homo sapiens
ctaaagtactgtagaggccc

SEQ ID NO: 3380 - DNA, 20 bp, Homo sapiens
ccccacctaaagtactgtag

SEQ ID NO: 3381 - DNA, 20 bp, Homo sapiens
ctgggcctctacagtacttt

SEQ ID NO: 3382 - DNA, 20 bp, Homo sapiens
ggcctctacagtactttagg

SEQ ID NO: 3383 - DNA, 20 bp, Homo sapiens
gcctctacagtactttaggt

SEQ ID NO: 3384 - DNA, 20 bp, Homo sapiens
cctctacagtactttaggtg

SEQ ID NO: 3385 - DNA, 20 bp, Homo sapiens
ctttaggtggggaagtactg

SEQ ID NO: 3386 - DNA, 20 bp, Homo sapiens
cacagcctgttgggacatgt

SEQ ID NO: 3387 - DNA, 20 bp, Homo sapiens
acacagcctgttgggacatg

SEQ ID NO: 3388 - DNA, 20 bp, Homo sapiens
tgtggcccacatgtcccaac

SEQ ID NO: 3389 - DNA, 20 bp, Homo sapiens
ggtgccacacacagcctgtt

SEQ ID NO: 3390 - DNA, 20 bp, Homo sapiens
aggtgccacacacagcctgt

SEQ ID NO: 3391 - DNA, 20 bp, Homo sapiens
atgtcccaacaggctgtgtg

SEQ ID NO: 3392 - DNA, 20 bp, Homo sapiens
cagtggcacaaagcactgtc

SEQ ID NO: 3393 - DNA, 20 bp, Homo sapiens
gacagtgctttgtgccactg

SEQ ID NO: 3394 - DNA, 20 bp, Homo sapiens
gagtaacacctgctccacag

SEQ ID NO: 3395 - DNA, 20 bp, Homo sapiens
gctttgtgccactgtggagc

SEQ ID NO: 3396 - DNA, 20 bp, Homo sapiens
taatcctaaaattcgtatga

SEQ ID NO: 3397 - DNA, 20 bp, Homo sapiens
ataatcctaaaattcgtatg

SEQ ID NO: 3398 - DNA, 20 bp, Homo sapiens
tactccctcatacgaatttt

SEQ ID NO: 3399 - DNA, 20 bp, Homo sapiens
aatgtcaatgaaattttgat

SEQ ID NO: 3400 - DNA, 20 bp, Homo sapiens
atgtcaatgaaattttgata

SEQ ID NO: 3401 - DNA, 20 bp, Homo sapiens
cattgaatctgtagattgtt

SEQ ID NO: 3402 - DNA, 20 bp, Homo sapiens
attgaatctgtagattgttt

SEQ ID NO: 3403 - DNA, 20 bp, Homo sapiens
ttgaatctgtagattgtttg

SEQ ID NO: 3404 - DNA, 20 bp, Homo sapiens
gtagattgtttggggttgta

SEQ ID NO: 3405 - DNA, 20 bp, Homo sapiens
gacatcccatgttcatgaat

SEQ ID NO: 3406 - DNA, 20 bp, Homo sapiens
attcttccaattcatgaaca

SEQ ID NO: 3407 - DNA, 20 bp, Homo sapiens
ttcttccaattcatgaacat

SEQ ID NO: 3408 - DNA, 20 bp, Homo sapiens
aacatgggatgtcttttttt

SEQ ID NO: 3409 - DNA, 20 bp, Homo sapiens
gctgtcccatatctgagatc

SEQ ID NO: 3410 - DNA, 20 bp, Homo sapiens
ttggcacctgatctcagata

SEQ ID NO: 3411 - DNA, 20 bp, Homo sapiens
tggcacctgatctcagatat

SEQ ID NO: 3412 - DNA, 20 bp, Homo sapiens
atacagatctttcacttcct

SEQ ID NO: 3413 - DNA, 20 bp, Homo sapiens
agatctttcacttccttggt

SEQ ID NO: 3414 - DNA, 20 bp, Homo sapiens
cttgcaaataaatccaacca

SEQ ID NO: 3415 - DNA, 20 bp, Homo sapiens
gttttcttgatttctttgtt

SEQ ID NO: 3416 - DNA, 20 bp, Homo sapiens
ttttcttgatttctttgtta

SEQ ID NO: 3417 - DNA, 20 bp, Homo sapiens
aatgaaatcagtaaagttgc

SEQ ID NO: 3418 - DNA, 20 bp, Homo sapiens
catttattctaacatcttat

SEQ ID NO: 3419 - DNA, 20 bp, Homo sapiens
ttattctaacatcttattgg

SEQ ID NO: 3420 - DNA, 20 bp, Homo sapiens
atcttattggtggaatcttt

SEQ ID NO: 3421 - DNA, 20 bp, Homo sapiens
tcttattggtggaatcttta

SEQ ID NO: 3422 - DNA, 20 bp, Homo sapiens
agatcatgtcatctgtaaac

SEQ ID NO: 3423 - DNA, 20 bp, Homo sapiens
gatcatgtcatctgtaaaca

SEQ ID NO: 3424 - DNA, 20 bp, Homo sapiens
aaaaggtatccaaattggaa

SEQ ID NO: 3425 - DNA, 20 bp, Homo sapiens
taagttcttcctttccaatt

SEQ ID NO: 3426 - DNA, 20 bp, Homo sapiens
gaaataaaaggtatccaaat

SEQ ID NO: 3427 - DNA, 20 bp, Homo sapiens
aggcaagaggaagaaataaa

SEQ ID NO: 3428 - DNA, 20 bp, Homo sapiens
agccaaaataattaggcaag

SEQ ID NO: 3429 - DNA, 20 bp, Homo sapiens
ggccctcagccaaaataatt

SEQ ID NO: 3430 - DNA, 20 bp, Homo sapiens
ttcctcttgcctaattattt

SEQ ID NO: 3431 - DNA, 20 bp, Homo sapiens
ttgcctaattattttggctg

SEQ ID NO: 3432 - DNA, 20 bp, Homo sapiens
tgcctaattattttggctga

SEQ ID NO: 3433 - DNA, 20 bp, Homo sapiens
ttggctgagggccaacttgt

SEQ ID NO: 3434 - DNA, 20 bp, Homo sapiens
caacaacaaacccaacaagt

SEQ ID NO: 3435 - DNA, 20 bp, Homo sapiens
tggctgagggccaacttgtt

SEQ ID NO: 3436 - DNA, 20 bp, Homo sapiens
cttgttgggtttgttgttgt

SEQ ID NO: 3437 - DNA, 20 bp, Homo sapiens
tggtttttgtctgtgtcttt

SEQ ID NO: 3438 - DNA, 20 bp, Homo sapiens
cttttggtgtttcgtgttgc

SEQ ID NO: 3439 - DNA, 20 bp, Homo sapiens
atatatctgtgactgtgtgc

SEQ ID NO: 3440 - DNA, 20 bp, Homo sapiens
cacacagtcacagatatatg

SEQ ID NO: 3441 - DNA, 20 bp, Homo sapiens
atgaggcagaaagaaaaccc

SEQ ID NO: 3442 - DNA, 20 bp, Homo sapiens
tgaggcagaaagaaaaccca

SEQ ID NO: 3443 - DNA, 20 bp, Homo sapiens
tgacatgacaggagttccct

SEQ ID NO: 3444 - DNA, 20 bp, Homo sapiens
atgacatgacaggagttccc

SEQ ID NO: 3445 - DNA, 20 bp, Homo sapiens
gacctgaggaatgacatgac

SEQ ID NO: 3446 - DNA, 20 bp, Homo sapiens
ctcctgtcatgtcattcctc

SEQ ID NO: 3447 - DNA, 20 bp, Homo sapiens
tgtagggaccttgggacctg

SEQ ID NO: 3448 - DNA, 20 bp, Homo sapiens
atgtcattcctcaggtccca

SEQ ID NO: 3449 - DNA, 20 bp, Homo sapiens
gcagaccatgtagggacctt

SEQ ID NO: 3450 - DNA, 20 bp, Homo sapiens
ggcagaccatgtagggacct

SEQ ID NO: 3451 - DNA, 20 bp, Homo sapiens
caggtcccaaggtccctaca

SEQ ID NO: 3452 - DNA, 20 bp, Homo sapiens
agaagaaggcagaccatgta

SEQ ID NO: 3453 - DNA, 20 bp, Homo sapiens
gagaagaaggcagaccatgt

SEQ ID NO: 3454 - DNA, 20 bp, Homo sapiens
actaaaaggtggagagaaga

SEQ ID NO: 3455 - DNA, 20 bp, Homo sapiens
gtatatcaaacactaaaagg

SEQ ID NO: 3456 - DNA, 20 bp, Homo sapiens
tatgtatatcaaacactaaa

SEQ ID NO: 3457 - DNA, 20 bp, Homo sapiens
tatatgtatgtgtaataccc

SEQ ID NO: 3458 - DNA, 20 bp, Homo sapiens
atatgtatgtgtaataccca

SEQ ID NO: 3459 - DNA, 20 bp, Homo sapiens
aaatctctgtatatttccct

SEQ ID NO: 3460 - DNA, 20 bp, Homo sapiens
aaaatctctgtatatttccc

SEQ ID NO: 3461 - DNA, 20 bp, Homo sapiens
attttaactgtccttagtgt

SEQ ID NO: 3462 - DNA, 20 bp, Homo sapiens
tgtccccacgccctacacta

SEQ ID NO: 3463 - DNA, 20 bp, Homo sapiens
ttttaactgtccttagtgta

SEQ ID NO: 3464 - DNA, 20 bp, Homo sapiens
actgtccttagtgtagggcg

SEQ ID NO: 3465 - DNA, 20 bp, Homo sapiens
ctgtccttagtgtagggcgt

SEQ ID NO: 3466 - DNA, 20 bp, Homo sapiens
tgtccttagtgtagggcgtg

SEQ ID NO: 3467 - DNA, 20 bp, Homo sapiens
ttagtgtagggcgtggggac

SEQ ID NO: 3468 - DNA, 20 bp, Homo sapiens
tgcatctattctaccttgct

SEQ ID NO: 3469 - DNA, 20 bp, Homo sapiens
gatttttccacttccaagca

SEQ ID NO: 3470 - DNA, 20 bp, Homo sapiens
tattctaccttgcttggaag

SEQ ID NO: 3471 - DNA, 20 bp, Homo sapiens
gaaatcaatttatcaccaac

SEQ ID NO: 3472 - DNA, 20 bp, Homo sapiens
aggagttctgtcatgccagt

SEQ ID NO: 3473 - DNA, 20 bp, Homo sapiens
aactggcatgacagaactcc

SEQ ID NO: 3474 - DNA, 20 bp, Homo sapiens
agacagctagacactaaacc

SEQ ID NO: 3475 - DNA, 20 bp, Homo sapiens
ggcatggtgattgattttag

SEQ ID NO: 3476 - DNA, 20 bp, Homo sapiens
gaagagagtgcctgatggca

SEQ ID NO: 3477 - DNA, 20 bp, Homo sapiens
aaatcaatcaccatgccatc

SEQ ID NO: 3478 - DNA, 20 bp, Homo sapiens
agagggaagagagtgcctga

SEQ ID NO: 3479 - DNA, 20 bp, Homo sapiens
atcaggcactctcttccctc

SEQ ID NO: 3480 - DNA, 20 bp, Homo sapiens
aggtaccagtacacaccaga

SEQ ID NO: 3481 - DNA, 20 bp, Homo sapiens
caggtaccagtacacaccag

SEQ ID NO: 3482 - DNA, 20 bp, Homo sapiens
ctcttccctctggtgtgtac

SEQ ID NO: 3483 - DNA, 20 bp, Homo sapiens
agggtgctggacgctgtttc

SEQ ID NO: 3484 - DNA, 20 bp, Homo sapiens
gttctgtgctctcagggtgc

SEQ ID NO: 3485 - DNA, 20 bp, Homo sapiens
agctgcgttctgtgctctca

SEQ ID NO: 3486 - DNA, 20 bp, Homo sapiens
aagctgcgttctgtgctctc

SEQ ID NO: 3487 - DNA, 20 bp, Homo sapiens
cgatttgggattattgggtg

SEQ ID NO: 3488 - DNA, 20 bp, Homo sapiens
tcgatttgggattattgggt

SEQ ID NO: 3489 - DNA, 20 bp, Homo sapiens
ctcgatttgggattattggg

SEQ ID NO: 3490 - DNA, 20 bp, Homo sapiens
gtgctcgatttgggattatt

SEQ ID NO: 3491 - DNA, 20 bp, Homo sapiens
tgtgctcgatttgggattat

SEQ ID NO: 3492 - DNA, 20 bp, Homo sapiens
cccaggtctgtgctcgattt

SEQ ID NO: 3493 - DNA, 20 bp, Homo sapiens
tcccaggtctgtgctcgatt

SEQ ID NO: 3494 - DNA, 20 bp, Homo sapiens
tcccaaatcgagcacagacc

SEQ ID NO: 3495 - DNA, 20 bp, Homo sapiens
cccaaatcgagcacagacct

SEQ ID NO: 3496 - DNA, 20 bp, Homo sapiens
agcttgtctcttcagctccc

SEQ ID NO: 3497 - DNA, 20 bp, Homo sapiens
tgggagctgaagagacaagc

SEQ ID NO: 3498 - DNA, 20 bp, Homo sapiens
gagctgaagagacaagctgg

SEQ ID NO: 3499 - DNA, 20 bp, Homo sapiens
gaagagacaagctggaggtc

SEQ ID NO: 3500 - DNA, 20 bp, Homo sapiens
gcagttctattacttaagcc

SEQ ID NO: 3501 - DNA, 20 bp, Homo sapiens
ttttggagtcaggaagaacc

SEQ ID NO: 3502 - DNA, 20 bp, Homo sapiens
ggcgcctggcttttggagtc

SEQ ID NO: 3503 - DNA, 20 bp, Homo sapiens
tcttcctgactccaaaagcc

SEQ ID NO: 3504 - DNA, 20 bp, Homo sapiens
atggggtggcgcctggcttt

SEQ ID NO: 3505 - DNA, 20 bp, Homo sapiens
aaggagcatggggtggcgcc

SEQ ID NO: 3506 - DNA, 20 bp, Homo sapiens
tgctgggaaggagcatgggg

SEQ ID NO: 3507 - DNA, 20 bp, Homo sapiens
ttctgctgggaaggagcatg

SEQ ID NO: 3508 - DNA, 20 bp, Homo sapiens
cttctgctgggaaggagcat

SEQ ID NO: 3509 - DNA, 20 bp, Homo sapiens
gcttctgctgggaaggagca

SEQ ID NO: 3510 - DNA, 20 bp, Homo sapiens
aaaaccagcttctgctggga

SEQ ID NO: 3511 - DNA, 20 bp, Homo sapiens
ggtgaaaaccagcttctgct

SEQ ID NO: 3512 - DNA, 20 bp, Homo sapiens
cggtgaaaaccagcttctgc

SEQ ID NO: 3513 - DNA, 20 bp, Homo sapiens
tgctccttcccagcagaagc

SEQ ID NO: 3514 - DNA, 20 bp, Homo sapiens
cagcagaagctggttttcac

SEQ ID NO: 3515 - DNA, 20 bp, Homo sapiens
agcagaagctggttttcacc

SEQ ID NO: 3516 - DNA, 20 bp, Homo sapiens
aagctggttttcaccgggtc

SEQ ID NO: 3517 - DNA, 20 bp, Homo sapiens
gccatcctgtcctcctgacc

SEQ ID NO: 3518 - DNA, 20 bp, Homo sapiens
ctggttttcaccgggtcagg

SEQ ID NO: 3519 - DNA, 20 bp, Homo sapiens
tttcaccgggtcaggaggac

SEQ ID NO: 3520 - DNA, 20 bp, Homo sapiens
accgggtcaggaggacagga

SEQ ID NO: 3521 - DNA, 20 bp, Homo sapiens
ggcactgctgtacaacggtc

SEQ ID NO: 3522 - DNA, 20 bp, Homo sapiens
gatgtggcactgctgtacaa

SEQ ID NO: 3523 - DNA, 20 bp, Homo sapiens
gttctggaaactaggagatg

SEQ ID NO: 3524 - DNA, 20 bp, Homo sapiens
cattaaatgttctggaaact

SEQ ID NO: 3525 - DNA, 20 bp, Homo sapiens
cagcaacacattaaatgttc

SEQ ID NO: 3526 - DNA, 20 bp, Homo sapiens
gaacatttaatgtgttgctg

SEQ ID NO: 3527 - DNA, 20 bp, Homo sapiens
catttaatgtgttgctgtgg

SEQ ID NO: 3528 - DNA, 20 bp, Homo sapiens
aatgtgttgctgtggaggcc

SEQ ID NO: 3529 - DNA, 20 bp, Homo sapiens
ggggctacttcagagctgcc

SEQ ID NO: 3530 - DNA, 20 bp, Homo sapiens
cggtttgtcctgggcgcaag

SEQ ID NO: 3531 - DNA, 20 bp, Homo sapiens
ccggtttgtcctgggcgcaa

SEQ ID NO: 3532 - DNA, 20 bp, Homo sapiens
cccggtttgtcctgggcgca

SEQ ID NO: 3533 - DNA, 20 bp, Homo sapiens
tgaagtagccccttgcgccc

SEQ ID NO: 3534 - DNA, 20 bp, Homo sapiens
ctccaggcccggtttgtcct

SEQ ID NO: 3535 - DNA, 20 bp, Homo sapiens
cctccaggcccggtttgtcc

SEQ ID NO: 3536 - DNA, 20 bp, Homo sapiens
cccttgcgcccaggacaaac

SEQ ID NO: 3537 - DNA, 20 bp, Homo sapiens
ccttgcgcccaggacaaacc

SEQ ID NO: 3538 - DNA, 20 bp, Homo sapiens
cgcccaggacaaaccgggcc

SEQ ID NO: 3539 - DNA, 20 bp, Homo sapiens
ccaccccacccctccaggcc

SEQ ID NO: 3540 - DNA, 20 bp, Homo sapiens
ccaggacaaaccgggcctgg

SEQ ID NO: 3541 - DNA, 20 bp, Homo sapiens
caggacaaaccgggcctgga

SEQ ID NO: 3542 - DNA, 20 bp, Homo sapiens
aggacaaaccgggcctggag

SEQ ID NO: 3543 - DNA, 20 bp, Homo sapiens
ttaccccaccccacccctcc

SEQ ID NO: 3544 - DNA, 20 bp, Homo sapiens
acaaaccgggcctggagggg

SEQ ID NO: 3545 - DNA, 20 bp, Homo sapiens
caaaccgggcctggaggggt

SEQ ID NO: 3546 - DNA, 20 bp, Homo sapiens
aaaccgggcctggaggggtg

SEQ ID NO: 3547 - DNA, 20 bp, Homo sapiens
ccgggcctggaggggtgggg

SEQ ID NO: 3548 - DNA, 20 bp, Homo sapiens
cgggcctggaggggtggggt

SEQ ID NO: 3549 - DNA, 20 bp, Homo sapiens
gggcctggaggggtggggtg

SEQ ID NO: 3550 - DNA, 20 bp, Homo sapiens
agaatgcccacgtgggatac

SEQ ID NO: 3551 - DNA, 20 bp, Homo sapiens
gaagcttccagtatcccacg

SEQ ID NO: 3552 - DNA, 20 bp, Homo sapiens
aagcttccagtatcccacgt

SEQ ID NO: 3553 - DNA, 20 bp, Homo sapiens
cagcaacagaatgcccacgt

SEQ ID NO: 3554 - DNA, 20 bp, Homo sapiens
tcagcaacagaatgcccacg

SEQ ID NO: 3555 - DNA, 20 bp, Homo sapiens
acgtgggcattctgttgctg

SEQ ID NO: 3556 - DNA, 20 bp, Homo sapiens
cgtgggcattctgttgctga

SEQ ID NO: 3557 - DNA, 20 bp, Homo sapiens
ccctcccttgcagggagggg

SEQ ID NO: 3558 - DNA, 20 bp, Homo sapiens
ttcccctcccttgcagggag

SEQ ID NO: 3559 - DNA, 20 bp, Homo sapiens
cttcccctcccttgcaggga

SEQ ID NO: 3560 - DNA, 20 bp, Homo sapiens
ccttcccctcccttgcaggg

SEQ ID NO: 3561 - DNA, 20 bp, Homo sapiens
ggcaaccgcccctccctgca

SEQ ID NO: 3562 - DNA, 20 bp, Homo sapiens
gcaaccgcccctccctgcaa

SEQ ID NO: 3563 - DNA, 20 bp, Homo sapiens
gctccttcccctcccttgca

SEQ ID NO: 3564 - DNA, 20 bp, Homo sapiens
tgctccttcccctcccttgc

SEQ ID NO: 3565 - DNA, 20 bp, Homo sapiens
accgcccctccctgcaaggg

SEQ ID NO: 3566 - DNA, 20 bp, Homo sapiens
ccgcccctccctgcaaggga

SEQ ID NO: 3567 - DNA, 20 bp, Homo sapiens
cgcccctccctgcaagggag

SEQ ID NO: 3568 - DNA, 20 bp, Homo sapiens
cctccctgcaagggagggga

SEQ ID NO: 3569 - DNA, 20 bp, Homo sapiens
tgcaagggaggggaaggagc

SEQ ID NO: 3570 - DNA, 20 bp, Homo sapiens
agggaggggaaggagcaggc

SEQ ID NO: 3571 - DNA, 20 bp, Homo sapiens
gtgaaatgtggagggaggaa

SEQ ID NO: 3572 - DNA, 20 bp, Homo sapiens
agtgaaatgtggagggagga

SEQ ID NO: 3573 - DNA, 20 bp, Homo sapiens
ctccagtgaaatgtggaggg

SEQ ID NO: 3574 - DNA, 20 bp, Homo sapiens
caactccagtgaaatgtgga

SEQ ID NO: 3575 - DNA, 20 bp, Homo sapiens
tcaactccagtgaaatgtgg

SEQ ID NO: 3576 - DNA, 20 bp, Homo sapiens
aggtcaactccagtgaaatg

SEQ ID NO: 3577 - DNA, 20 bp, Homo sapiens
ttcctccctccacatttcac

SEQ ID NO: 3578 - DNA, 20 bp, Homo sapiens
gtgcaaccacagtaggacac

SEQ ID NO: 3579 - DNA, 20 bp, Homo sapiens
agttgacctgtgtcctactg

SEQ ID NO: 3580 - DNA, 20 bp, Homo sapiens
ggtccaggtgcaaccacagt

SEQ ID NO: 3581 - DNA, 20 bp, Homo sapiens
tgtcctactgtggttgcacc

SEQ ID NO: 3582 - DNA, 20 bp, Homo sapiens
cagtccctctgggctggtcc

SEQ ID NO: 3583 - DNA, 20 bp, Homo sapiens
ttgcacctggaccagcccag

SEQ ID NO: 3584 - DNA, 20 bp, Homo sapiens
tcactccagtccctctgggc

SEQ ID NO: 3585 - DNA, 20 bp, Homo sapiens
tgcacctggaccagcccaga

SEQ ID NO: 3586 - DNA, 20 bp, Homo sapiens
agagtcactccagtccctct

SEQ ID NO: 3587 - DNA, 20 bp, Homo sapiens
aagagtcactccagtccctc

SEQ ID NO: 3588 - DNA, 20 bp, Homo sapiens
ctggaccagcccagagggac

SEQ ID NO: 3589 - DNA, 20 bp, Homo sapiens
actggagtgactcttcccgc

SEQ ID NO: 3590 - DNA, 20 bp, Homo sapiens
gagtgactcttcccgcaggt

SEQ ID NO: 3591 - DNA, 20 bp, Homo sapiens
gctggctgtgccctacctgc

SEQ ID NO: 3592 - DNA, 20 bp, Homo sapiens
agtgactcttcccgcaggta

SEQ ID NO: 3593 - DNA, 20 bp, Homo sapiens
ggctggctgtgccctacctg

SEQ ID NO: 3594 - DNA, 20 bp, Homo sapiens
caggtagggcacagccagcc

SEQ ID NO: 3595 - DNA, 20 bp, Homo sapiens
aggtagggcacagccagcct

SEQ ID NO: 3596 - DNA, 20 bp, Homo sapiens
gtgaggccctgtgcccaggc

SEQ ID NO: 3597 - DNA, 20 bp, Homo sapiens
ggcacagccagcctgggcac

SEQ ID NO: 3598 - DNA, 20 bp, Homo sapiens
tgcagtgaggccctgtgccc

SEQ ID NO: 3599 - DNA, 20 bp, Homo sapiens
gcacagccagcctgggcaca

SEQ ID NO: 3600 - DNA, 20 bp, Homo sapiens
ggggcgcagggattgcagtg

SEQ ID NO: 3601 - DNA, 20 bp, Homo sapiens
ccccagggaggcggggcgca

SEQ ID NO: 3602 - DNA, 20 bp, Homo sapiens
cccccagggaggcggggcgc

SEQ ID NO: 3603 - DNA, 20 bp, Homo sapiens
ggaaatcccccagggaggcg

SEQ ID NO: 3604 - DNA, 20 bp, Homo sapiens
tggaaatcccccagggaggc

SEQ ID NO: 3605 - DNA, 20 bp, Homo sapiens
atccctgcgccccgcctccc

SEQ ID NO: 3606 - DNA, 20 bp, Homo sapiens
ctggaaatcccccagggagg

SEQ ID NO: 3607 - DNA, 20 bp, Homo sapiens
tccctgcgccccgcctccct

SEQ ID NO: 3608 - DNA, 20 bp, Homo sapiens
ccctgcgccccgcctccctg

SEQ ID NO: 3609 - DNA, 20 bp, Homo sapiens
cctgcgccccgcctccctgg

SEQ ID NO: 3610 - DNA, 20 bp, Homo sapiens
cccctggaaatcccccaggg

SEQ ID NO: 3611 - DNA, 20 bp, Homo sapiens
caacccctggaaatccccca

SEQ ID NO: 3612 - DNA, 20 bp, Homo sapiens
acaacccctggaaatccccc

SEQ ID NO: 3613 - DNA, 20 bp, Homo sapiens
cgcctccctgggggatttcc

SEQ ID NO: 3614 - DNA, 20 bp, Homo sapiens
gcctccctgggggatttcca

SEQ ID NO: 3615 - DNA, 20 bp, Homo sapiens
cctccctgggggatttccag

SEQ ID NO: 3616 - DNA, 20 bp, Homo sapiens
ccaagcagcaggacaacccc

SEQ ID NO: 3617 - DNA, 20 bp, Homo sapiens
ccaggggttgtcctgctgct

SEQ ID NO: 3618 - DNA, 20 bp, Homo sapiens
cccccagctcaccaagcagc

SEQ ID NO: 3619 - DNA, 20 bp, Homo sapiens
tgtcctgctgcttggtgagc

SEQ ID NO: 3620 - DNA, 20 bp, Homo sapiens
gtcctgctgcttggtgagct

SEQ ID NO: 3621 - DNA, 20 bp, Homo sapiens
tcctgctgcttggtgagctg

SEQ ID NO: 3622 - DNA, 20 bp, Homo sapiens
cctgctgcttggtgagctgg

SEQ ID NO: 3623 - DNA, 20 bp, Homo sapiens
tgcttggtgagctgggggtg

SEQ ID NO: 3624 - DNA, 20 bp, Homo sapiens
gcttggtgagctgggggtgt

SEQ ID NO: 3625 - DNA, 20 bp, Homo sapiens
cttggtgagctgggggtgtg

SEQ ID NO: 3626 - DNA, 20 bp, Homo sapiens
ttggtgagctgggggtgtgg

SEQ ID NO: 3627 - DNA, 20 bp, Homo sapiens
ggtgtgggggaccacagatg

SEQ ID NO: 3628 - DNA, 20 bp, Homo sapiens
ttaggcgcctgcctcatctg

SEQ ID NO: 3629 - DNA, 20 bp, Homo sapiens
tgggggaccacagatgaggc

SEQ ID NO: 3630 - DNA, 20 bp, Homo sapiens
ggactccgcccaagcaattt

SEQ ID NO: 3631 - DNA, 20 bp, Homo sapiens
aggcaggcgcctaaattgct

SEQ ID NO: 3632 - DNA, 20 bp, Homo sapiens
ggcaggcgcctaaattgctt

SEQ ID NO: 3633 - DNA, 20 bp, Homo sapiens
aggcgcctaaattgcttggg

SEQ ID NO: 3634 - DNA, 20 bp, Homo sapiens
taaattgcttgggcggagtc

SEQ ID NO: 3635 - DNA, 20 bp, Homo sapiens
gcctggagggagagagcagc

SEQ ID NO: 3636 - DNA, 20 bp, Homo sapiens
tccggctgctctctccctcc

SEQ ID NO: 3637 - DNA, 20 bp, Homo sapiens
gacacaggaaagggcctgga

SEQ ID NO: 3638 - DNA, 20 bp, Homo sapiens
ggacacaggaaagggcctgg

SEQ ID NO: 3639 - DNA, 20 bp, Homo sapiens
cgaggacacaggaaagggcc

SEQ ID NO: 3640 - DNA, 20 bp, Homo sapiens
gggcccgaggacacaggaaa

SEQ ID NO: 3641 - DNA, 20 bp, Homo sapiens
ggggcccgaggacacaggaa

SEQ ID NO: 3642 - DNA, 20 bp, Homo sapiens
cccgaggggcccgaggacac

SEQ ID NO: 3643 - DNA, 20 bp, Homo sapiens
caggccctttcctgtgtcct

SEQ ID NO: 3644 - DNA, 20 bp, Homo sapiens
aggccctttcctgtgtcctc

SEQ ID NO: 3645 - DNA, 20 bp, Homo sapiens
gcagggacccgaggggcccg

SEQ ID NO: 3646 - DNA, 20 bp, Homo sapiens
tcctgtgtcctcgggcccct

SEQ ID NO: 3647 - DNA, 20 bp, Homo sapiens
cctgtgtcctcgggcccctc

SEQ ID NO: 3648 - DNA, 20 bp, Homo sapiens
gcctggtgcagggacccgag

SEQ ID NO: 3649 - DNA, 20 bp, Homo sapiens
ggcctggtgcagggacccga

SEQ ID NO: 3650 - DNA, 20 bp, Homo sapiens
tggcctggtgcagggacccg

SEQ ID NO: 3651 - DNA, 20 bp, Homo sapiens
gcccctcgggtccctgcacc

SEQ ID NO: 3652 - DNA, 20 bp, Homo sapiens
attgctgctggcctggtgca

SEQ ID NO: 3653 - DNA, 20 bp, Homo sapiens
gattgctgctggcctggtgc

SEQ ID NO: 3654 - DNA, 20 bp, Homo sapiens
acacccgattgctgctggcc

SEQ ID NO: 3655 - DNA, 20 bp, Homo sapiens
ctctgacacccgattgctgc

SEQ ID NO: 3656 - DNA, 20 bp, Homo sapiens
tgcaccaggccagcagcaat

SEQ ID NO: 3657 - DNA, 20 bp, Homo sapiens
gcaccaggccagcagcaatc

SEQ ID NO: 3658 - DNA, 20 bp, Homo sapiens
cagcagcaatcgggtgtcag

SEQ ID NO: 3659 - DNA, 20 bp, Homo sapiens
ggtgtcagaggttcaagtcc

SEQ ID NO: 3660 - DNA, 20 bp, Homo sapiens
gtgcgtcccaggagtcagcc

SEQ ID NO: 3661 - DNA, 20 bp, Homo sapiens
ttcaagtccaggctgactcc

SEQ ID NO: 3662 - DNA, 20 bp, Homo sapiens
tcaagtccaggctgactcct

SEQ ID NO: 3663 - DNA, 20 bp, Homo sapiens
gggcaaagtcggtgcgtccc

SEQ ID NO: 3664 - DNA, 20 bp, Homo sapiens
ccagccctcctgggcaaagt

SEQ ID NO: 3665 - DNA, 20 bp, Homo sapiens
gggacgcaccgactttgccc

SEQ ID NO: 3666 - DNA, 20 bp, Homo sapiens
acgcaccgactttgcccagg

SEQ ID NO: 3667 - DNA, 20 bp, Homo sapiens
cgcaccgactttgcccagga

SEQ ID NO: 3668 - DNA, 20 bp, Homo sapiens
gccctctccccagccctcct

SEQ ID NO: 3669 - DNA, 20 bp, Homo sapiens
tgccctctccccagccctcc

SEQ ID NO: 3670 - DNA, 20 bp, Homo sapiens
ccgactttgcccaggagggc

SEQ ID NO: 3671 - DNA, 20 bp, Homo sapiens
cgactttgcccaggagggct

SEQ ID NO: 3672 - DNA, 20 bp, Homo sapiens
gactttgcccaggagggctg

SEQ ID NO: 3673 - DNA, 20 bp, Homo sapiens
tgcccaggagggctggggag

SEQ ID NO: 3674 - DNA, 20 bp, Homo sapiens
gcccaggagggctggggaga

SEQ ID NO: 3675 - DNA, 20 bp, Homo sapiens
taatcaaagatgacactttg

SEQ ID NO: 3676 - DNA, 20 bp, Homo sapiens
ataatcaaagatgacacttt

SEQ ID NO: 3677 - DNA, 20 bp, Homo sapiens
aataatcaaagatgacactt

SEQ ID NO: 3678 - DNA, 20 bp, Homo sapiens
catgcccaaggctggctttg

SEQ ID NO: 3679 - DNA, 20 bp, Homo sapiens
acatgcccaaggctggcttt

SEQ ID NO: 3680 - DNA, 20 bp, Homo sapiens
cacatgcccaaggctggctt

SEQ ID NO: 3681 - DNA, 20 bp, Homo sapiens
tttgtccccaaagccagcct

SEQ ID NO: 3682 - DNA, 20 bp, Homo sapiens
ttgtccccaaagccagcctt

SEQ ID NO: 3683 - DNA, 20 bp, Homo sapiens
gctgggcacatgcccaaggc

SEQ ID NO: 3684 - DNA, 20 bp, Homo sapiens
ctgtgctgggcacatgccca

SEQ ID NO: 3685 - DNA, 20 bp, Homo sapiens
cttgggcatgtgcccagcac

SEQ ID NO: 3686 - DNA, 20 bp, Homo sapiens
ttgggcatgtgcccagcaca

SEQ ID NO: 3687 - DNA, 20 bp, Homo sapiens
gcagcagctctccctgtgct

SEQ ID NO: 3688 - DNA, 20 bp, Homo sapiens
ggcagcagctctccctgtgc

SEQ ID NO: 3689 - DNA, 20 bp, Homo sapiens
agggagagctgctgcctctg

SEQ ID NO: 3690 - DNA, 20 bp, Homo sapiens
gggagagctgctgcctctgt

SEQ ID NO: 3691 - DNA, 20 bp, Homo sapiens
aaaatgactcaagcccacag

SEQ ID NO: 3692 - DNA, 20 bp, Homo sapiens
aaacagagcagagaggggca

SEQ ID NO: 3693 - DNA, 20 bp, Homo sapiens
aaaccaaacagagcagagag

SEQ ID NO: 3694 - DNA, 20 bp, Homo sapiens
taaaccaaacagagcagaga

SEQ ID NO: 3695 - DNA, 20 bp, Homo sapiens
ttaaaccaaacagagcagag

SEQ ID NO: 3696 - DNA, 20 bp, Homo sapiens
ttgcccctctctgctctgtt

SEQ ID NO: 3697 - DNA, 20 bp, Homo sapiens
ctcgcctcacccatgggtgt

SEQ ID NO: 3698 - DNA, 20 bp, Homo sapiens
aaaacaaaaaccaacaccca

SEQ ID NO: 3699 - DNA, 20 bp, Homo sapiens
aaacaaaaaccaacacccat

SEQ ID NO: 3700 - DNA, 20 bp, Homo sapiens
cctcgcctcgcctcacccat

SEQ ID NO: 3701 - DNA, 20 bp, Homo sapiens
aaaaccaacacccatgggtg

SEQ ID NO: 3702 - DNA, 20 bp, Homo sapiens
gcctcgcctcgcctcaccca

SEQ ID NO: 3703 - DNA, 20 bp, Homo sapiens
caacacccatgggtgaggcg

SEQ ID NO: 3704 - DNA, 20 bp, Homo sapiens
cccatgggtgaggcgaggcg

SEQ ID NO: 3705 - DNA, 20 bp, Homo sapiens
gggtgaggcgaggcgaggcg

SEQ ID NO: 3706 - DNA, 20 bp, Homo sapiens
gggaggaagcgggtggatca

SEQ ID NO: 3707 - DNA, 20 bp, Homo sapiens
gctgcaggggaggaagcggg

SEQ ID NO: 3708 - DNA, 20 bp, Homo sapiens
gaggctgcaggggaggaagc

SEQ ID NO: 3709 - DNA, 20 bp, Homo sapiens
cgaggctgcaggggaggaag

SEQ ID NO: 3710 - DNA, 20 bp, Homo sapiens
ggggcccgaggctgcagggg

SEQ ID NO: 3711 - DNA, 20 bp, Homo sapiens
gatggggcccgaggctgcag

SEQ ID NO: 3712 - DNA, 20 bp, Homo sapiens
ggatggggcccgaggctgca

SEQ ID NO: 3713 - DNA, 20 bp, Homo sapiens
aggatggggcccgaggctgc

SEQ ID NO: 3714 - DNA, 20 bp, Homo sapiens
cgcttcctcccctgcagcct

SEQ ID NO: 3715 - DNA, 20 bp, Homo sapiens
gcttcctcccctgcagcctc

SEQ ID NO: 3716 - DNA, 20 bp, Homo sapiens
acgcgggaggatggggcccg

SEQ ID NO: 3717 - DNA, 20 bp, Homo sapiens
tgcggccacgcgggaggatg

SEQ ID NO: 3718 - DNA, 20 bp, Homo sapiens
gtgcggccacgcgggaggat

SEQ ID NO: 3719 - DNA, 20 bp, Homo sapiens
agtgcggccacgcgggagga

SEQ ID NO: 3720 - DNA, 20 bp, Homo sapiens
tcgggccccatcctcccgcg

SEQ ID NO: 3721 - DNA, 20 bp, Homo sapiens
ccctagtgcggccacgcggg

SEQ ID NO: 3722 - DNA, 20 bp, Homo sapiens
cacccctagtgcggccacgc

SEQ ID NO: 3723 - DNA, 20 bp, Homo sapiens
gcacccctagtgcggccacg

SEQ ID NO: 3724 - DNA, 20 bp, Homo sapiens
tcctcccgcgtggccgcact

SEQ ID NO: 3725 - DNA, 20 bp, Homo sapiens
cctcccgcgtggccgcacta

SEQ ID NO: 3726 - DNA, 20 bp, Homo sapiens
ctcccgcgtggccgcactag

SEQ ID NO: 3727 - DNA, 20 bp, Homo sapiens
cgcccccagcacccctagtg

SEQ ID NO: 3728 - DNA, 20 bp, Homo sapiens
cgtggccgcactaggggtgc

SEQ ID NO: 3729 - DNA, 20 bp, Homo sapiens
gtggccgcactaggggtgct

SEQ ID NO: 3730 - DNA, 20 bp, Homo sapiens
tggccgcactaggggtgctg

SEQ ID NO: 3731 - DNA, 20 bp, Homo sapiens
ggccgcactaggggtgctgg

SEQ ID NO: 3732 - DNA, 20 bp, Homo sapiens
cgcactaggggtgctggggg

SEQ ID NO: 3733 - DNA, 20 bp, Homo sapiens
taggggtgctgggggcggag

SEQ ID NO: 3734 - DNA, 20 bp, Homo sapiens
aggggtgctgggggcggagt

SEQ ID NO: 3735 - DNA, 20 bp, Homo sapiens
ggggtgctgggggcggagtg

SEQ ID NO: 3736 - DNA, 20 bp, Homo sapiens
acccagaacccactcaggtc

SEQ ID NO: 3737 - DNA, 20 bp, Homo sapiens
gagtggggaccagacctgag

SEQ ID NO: 3738 - DNA, 20 bp, Homo sapiens
agtggggaccagacctgagt

SEQ ID NO: 3739 - DNA, 20 bp, Homo sapiens
gctgaacccagaacccactc

SEQ ID NO: 3740 - DNA, 20 bp, Homo sapiens
gaccagacctgagtgggttc

SEQ ID NO: 3741 - DNA, 20 bp, Homo sapiens
accagacctgagtgggttct

SEQ ID NO: 3742 - DNA, 20 bp, Homo sapiens
tctgggttcagcttcgcagc

SEQ ID NO: 3743 - DNA, 20 bp, Homo sapiens
agcttcgcagcaggagcagc

SEQ ID NO: 3744 - DNA, 20 bp, Homo sapiens
gcttcgcagcaggagcagct

SEQ ID NO: 3745 - DNA, 20 bp, Homo sapiens
cttcgcagcaggagcagctg

SEQ ID NO: 3746 - DNA, 20 bp, Homo sapiens
gcagctggggcatcatcagt

SEQ ID NO: 3747 - DNA, 20 bp, Homo sapiens
cagctggggcatcatcagtt

SEQ ID NO: 3748 - DNA, 20 bp, Homo sapiens
tggggcatcatcagttgggc

SEQ ID NO: 3749 - DNA, 20 bp, Homo sapiens
atcagttgggcaggtgaccc

SEQ ID NO: 3750 - DNA, 20 bp, Homo sapiens
aagattcctgctcagatcct

SEQ ID NO: 3751 - DNA, 20 bp, Homo sapiens
gaagattcctgctcagatcc

SEQ ID NO: 3752 - DNA, 20 bp, Homo sapiens
aggtgacccaggatctgagc

SEQ ID NO: 3753 - DNA, 20 bp, Homo sapiens
gatctgagcaggaatcttcc

SEQ ID NO: 3754 - DNA, 20 bp, Homo sapiens
ctgagcaggaatcttccagg

SEQ ID NO: 3755 - DNA, 20 bp, Homo sapiens
agcaggaatcttccaggtgg

SEQ ID NO: 3756 - DNA, 20 bp, Homo sapiens
ggggcggccccacctccacc

SEQ ID NO: 3757 - DNA, 20 bp, Homo sapiens
aggaatcttccaggtggagg

SEQ ID NO: 3758 - DNA, 20 bp, Homo sapiens
ggaatcttccaggtggaggt

SEQ ID NO: 3759 - DNA, 20 bp, Homo sapiens
gaatcttccaggtggaggtg

SEQ ID NO: 3760 - DNA, 20 bp, Homo sapiens
agctgtggcaagcagagggg

SEQ ID NO: 3761 - DNA, 20 bp, Homo sapiens
ggcagctgtggcaagcagag

SEQ ID NO: 3762 - DNA, 20 bp, Homo sapiens
aggcagctgtggcaagcaga

SEQ ID NO: 3763 - DNA, 20 bp, Homo sapiens
aaggcagctgtggcaagcag

SEQ ID NO: 3764 - DNA, 20 bp, Homo sapiens
cccagagcagaaggcagctg

SEQ ID NO: 3765 - DNA, 20 bp, Homo sapiens
agtgctgcccccagagcaga

SEQ ID NO: 3766 - DNA, 20 bp, Homo sapiens
gccacagctgccttctgctc

SEQ ID NO: 3767 - DNA, 20 bp, Homo sapiens
ccacagctgccttctgctct

SEQ ID NO: 3768 - DNA, 20 bp, Homo sapiens
cacagctgccttctgctctg

SEQ ID NO: 3769 - DNA, 20 bp, Homo sapiens
acagctgccttctgctctgg

SEQ ID NO: 3770 - DNA, 20 bp, Homo sapiens
ttctgctctgggggcagcac

SEQ ID NO: 3771 - DNA, 20 bp, Homo sapiens
tttcaaaggccttacttcac

SEQ ID NO: 3772 - DNA, 20 bp, Homo sapiens
gctgagaatccagtgaagta

SEQ ID NO: 3773 - DNA, 20 bp, Homo sapiens
gtgaagtaaggcctttgaaa

SEQ ID NO: 3774 - DNA, 20 bp, Homo sapiens
tacaatcaaaaccatttcaa

SEQ ID NO: 3775 - DNA, 20 bp, Homo sapiens
ataaaaaataaaaaaaggaa

SEQ ID NO: 3776 - DNA, 20 bp, Homo sapiens
ttattttttattttttgaga

SEQ ID NO: 3777 - DNA, 20 bp, Homo sapiens
tattttttattttttgagac

SEQ ID NO: 3778 - DNA, 20 bp, Homo sapiens
actccagcctgggtgacaga

SEQ ID NO: 3779 - DNA, 20 bp, Homo sapiens
cactccagcctgggtgacag

SEQ ID NO: 3780 - DNA, 20 bp, Homo sapiens
cgggtctccctctgtcaccc

SEQ ID NO: 3781 - DNA, 20 bp, Homo sapiens
tctccctctgtcacccaggc

SEQ ID NO: 3782 - DNA, 20 bp, Homo sapiens
tcacgactgcactccagcct

SEQ ID NO: 3783 - DNA, 20 bp, Homo sapiens
ttcacgactgcactccagcc

SEQ ID NO: 3784 - DNA, 20 bp, Homo sapiens
tggagtgcagtcgtgaaatg

SEQ ID NO: 3785 - DNA, 20 bp, Homo sapiens
ggagtgcagtcgtgaaatgt

SEQ ID NO: 3786 - DNA, 20 bp, Homo sapiens
cacttgaacctgggaggtgg

SEQ ID NO: 3787 - DNA, 20 bp, Homo sapiens
cactgcaacctccacctccc

SEQ ID NO: 3788 - DNA, 20 bp, Homo sapiens
aatcacttgaacctgggagg

SEQ ID NO: 3789 - DNA, 20 bp, Homo sapiens
gagaatcacttgaacctggg

SEQ ID NO: 3790 - DNA, 20 bp, Homo sapiens
caggagaatcacttgaacct

SEQ ID NO: 3791 - DNA, 20 bp, Homo sapiens
gcaggagaatcacttgaacc

SEQ ID NO: 3792 - DNA, 20 bp, Homo sapiens
actactcaggaggctgaggc

SEQ ID NO: 3793 - DNA, 20 bp, Homo sapiens
cccaactactcaggaggctg

SEQ ID NO: 3794 - DNA, 20 bp, Homo sapiens
tgtaatcccaactactcagg

SEQ ID NO: 3795 - DNA, 20 bp, Homo sapiens
acttgtaatcccaactactc

SEQ ID NO: 3796 - DNA, 20 bp, Homo sapiens
gcctcagcctcctgagtagt

SEQ ID NO: 3797 - DNA, 20 bp, Homo sapiens
cctcagcctcctgagtagtt

SEQ ID NO: 3798 - DNA, 20 bp, Homo sapiens
acttagtcaggtgtggtggc

SEQ ID NO: 3799 - DNA, 20 bp, Homo sapiens
caaaacttagtcaggtgtgg

SEQ ID NO: 3800 - DNA, 20 bp, Homo sapiens
atacaaaacttagtcaggtg

SEQ ID NO: 3801 - DNA, 20 bp, Homo sapiens
aaaaaatacaaaacttagtc

SEQ ID NO: 3802 - DNA, 20 bp, Homo sapiens
tttgtattttttagtagaga

SEQ ID NO: 3803 - DNA, 20 bp, Homo sapiens
gagatggagtttcaccatgt

SEQ ID NO: 3804 - DNA, 20 bp, Homo sapiens
tgagaccagcctggccaaca

SEQ ID NO: 3805 - DNA, 20 bp, Homo sapiens
ggagtttcaccatgttggcc

SEQ ID NO: 3806 - DNA, 20 bp, Homo sapiens
tttcaccatgttggccaggc

SEQ ID NO: 3807 - DNA, 20 bp, Homo sapiens
atatgagtttgagaccagcc

SEQ ID NO: 3808 - DNA, 20 bp, Homo sapiens
cgaggagggtggatcacttg

SEQ ID NO: 3809 - DNA, 20 bp, Homo sapiens
ctttgggaggacgaggaggg

SEQ ID NO: 3810 - DNA, 20 bp, Homo sapiens
gcactttgggaggacgagga

SEQ ID NO: 3811 - DNA, 20 bp, Homo sapiens
agcactttgggaggacgagg

SEQ ID NO: 3812 - DNA, 20 bp, Homo sapiens
cccagcactttgggaggacg

SEQ ID NO: 3813 - DNA, 20 bp, Homo sapiens
caaaatcccagcactttggg

SEQ ID NO: 3814 - DNA, 20 bp, Homo sapiens
tggcaaaatcccagcacttt

SEQ ID NO: 3815 - DNA, 20 bp, Homo sapiens
tcctcgtcctcccaaagtgc

SEQ ID NO: 3816 - DNA, 20 bp, Homo sapiens
atggcaaaatcccagcactt

SEQ ID NO: 3817 - DNA, 20 bp, Homo sapiens
cctcgtcctcccaaagtgct

SEQ ID NO: 3818 - DNA, 20 bp, Homo sapiens
tggctgagcgtggtggctca

SEQ ID NO: 3819 - DNA, 20 bp, Homo sapiens
ctaaacatggctgagcgtgg

SEQ ID NO: 3820 - DNA, 20 bp, Homo sapiens
tggctaaacatggctgagcg

SEQ ID NO: 3821 - DNA, 20 bp, Homo sapiens
cttttaaaaatggctaaaca

SEQ ID NO: 3822 - DNA, 20 bp, Homo sapiens
ctgttcacaccttttaaaaa

SEQ ID NO: 3823 - DNA, 20 bp, Homo sapiens
catgtttagccatttttaaa

SEQ ID NO: 3824 - DNA, 20 bp, Homo sapiens
tctagcaagaattagccttt

SEQ ID NO: 3825 - DNA, 20 bp, Homo sapiens
gggggacccagggcacctaa

SEQ ID NO: 3826 - DNA, 20 bp, Homo sapiens
gaattagcctttaggtgccc

SEQ ID NO: 3827 - DNA, 20 bp, Homo sapiens
aattagcctttaggtgccct

SEQ ID NO: 3828 - DNA, 20 bp, Homo sapiens
gcggtgaggagggggaccca

SEQ ID NO: 3829 - DNA, 20 bp, Homo sapiens
ggcggtgaggagggggaccc

SEQ ID NO: 3830 - DNA, 20 bp, Homo sapiens
ggtggggggcggtgaggagg

SEQ ID NO: 3831 - DNA, 20 bp, Homo sapiens
gggtggggggcggtgaggag

SEQ ID NO: 3832 - DNA, 20 bp, Homo sapiens
ggggtggggggcggtgagga

SEQ ID NO: 3833 - DNA, 20 bp, Homo sapiens
cggggtggggggcggtgagg

SEQ ID NO: 3834 - DNA, 20 bp, Homo sapiens
cggcggggtggggggcggtg

SEQ ID NO: 3835 - DNA, 20 bp, Homo sapiens
gaaggcggcggggtgggggg

SEQ ID NO: 3836 - DNA, 20 bp, Homo sapiens
tcagaaggcggcggggtggg

SEQ ID NO: 3837 - DNA, 20 bp, Homo sapiens
ctcagaaggcggcggggtgg

SEQ ID NO: 3838 - DNA, 20 bp, Homo sapiens
tctcagaaggcggcggggtg

SEQ ID NO: 3839 - DNA, 20 bp, Homo sapiens
ttctcagaaggcggcggggt

SEQ ID NO: 3840 - DNA, 20 bp, Homo sapiens
cttctcagaaggcggcgggg

SEQ ID NO: 3841 - DNA, 20 bp, Homo sapiens
acgcttctcagaaggcggcg

SEQ ID NO: 3842 - DNA, 20 bp, Homo sapiens
aacgcttctcagaaggcggc

SEQ ID NO: 3843 - DNA, 20 bp, Homo sapiens
aaacgcttctcagaaggcgg

SEQ ID NO: 3844 - DNA, 20 bp, Homo sapiens
acaaaacgcttctcagaagg

SEQ ID NO: 3845 - DNA, 20 bp, Homo sapiens
attacaaaacgcttctcaga

SEQ ID NO: 3846 - DNA, 20 bp, Homo sapiens
aatttttcttatttataaaa

SEQ ID NO: 3847 - DNA, 20 bp, Homo sapiens
atttttcttatttataaaat

SEQ ID NO: 3848 - DNA, 20 bp, Homo sapiens
ggacctgtgagactgtgaag

SEQ ID NO: 3849 - DNA, 20 bp, Homo sapiens
tttcctcttcacagtctcac

SEQ ID NO: 3850 - DNA, 20 bp, Homo sapiens
agtctcacaggtccttcccc

SEQ ID NO: 3851 - DNA, 20 bp, Homo sapiens
gagcctcttggacctgggga

SEQ ID NO: 3852 - DNA, 20 bp, Homo sapiens
agaagagcctcttggacctg

SEQ ID NO: 3853 - DNA, 20 bp, Homo sapiens
cagaagagcctcttggacct

SEQ ID NO: 3854 - DNA, 20 bp, Homo sapiens
acagaagagcctcttggacc

SEQ ID NO: 3855 - DNA, 20 bp, Homo sapiens
ggtccttccccaggtccaag

SEQ ID NO: 3856 - DNA, 20 bp, Homo sapiens
caggacacagaagagcctct

SEQ ID NO: 3857 - DNA, 20 bp, Homo sapiens
ctaggcagctacttgtcatc

SEQ ID NO: 3858 - DNA, 20 bp, Homo sapiens
gacaagtagctgcctagccg

SEQ ID NO: 3859 - DNA, 20 bp, Homo sapiens
taggaggtgccaccacggct

SEQ ID NO: 3860 - DNA, 20 bp, Homo sapiens
aagtagctgcctagccgtgg

SEQ ID NO: 3861 - DNA, 20 bp, Homo sapiens
tgtgataggaggtgccacca

SEQ ID NO: 3862 - DNA, 20 bp, Homo sapiens
gtcccttaacatgtgatagg

SEQ ID NO: 3863 - DNA, 20 bp, Homo sapiens
ggggtcccttaacatgtgat

SEQ ID NO: 3864 - DNA, 20 bp, Homo sapiens
gcacctcctatcacatgtta

SEQ ID NO: 3865 - DNA, 20 bp, Homo sapiens
cacctcctatcacatgttaa

SEQ ID NO: 3866 - DNA, 20 bp, Homo sapiens
atgttaagggacccctcccc

SEQ ID NO: 3867 - DNA, 20 bp, Homo sapiens
ccaggtgtggccctggggag

SEQ ID NO: 3868 - DNA, 20 bp, Homo sapiens
tgttaagggacccctcccca

SEQ ID NO: 3869 - DNA, 20 bp, Homo sapiens
gccaggtgtggccctgggga

SEQ ID NO: 3870 - DNA, 20 bp, Homo sapiens
tgccaggtgtggccctgggg

SEQ ID NO: 3871 - DNA, 20 bp, Homo sapiens
ttctgccaggtgtggccctg

SEQ ID NO: 3872 - DNA, 20 bp, Homo sapiens
cttctgccaggtgtggccct

SEQ ID NO: 3873 - DNA, 20 bp, Homo sapiens
ccttctgccaggtgtggccc

SEQ ID NO: 3874 - DNA, 20 bp, Homo sapiens
cccctccccagggccacacc

SEQ ID NO: 3875 - DNA, 20 bp, Homo sapiens
aagccaccttctgccaggtg

SEQ ID NO: 3876 - DNA, 20 bp, Homo sapiens
ccagggccacacctggcaga

SEQ ID NO: 3877 - DNA, 20 bp, Homo sapiens
atcataagccaccttctgcc

SEQ ID NO: 3878 - DNA, 20 bp, Homo sapiens
gggccacacctggcagaagg

SEQ ID NO: 3879 - DNA, 20 bp, Homo sapiens
tgggcttagaattttatctt

SEQ ID NO: 3880 - DNA, 20 bp, Homo sapiens
attccgatggctgggggagt

SEQ ID NO: 3881 - DNA, 20 bp, Homo sapiens
cattccgatggctgggggag

SEQ ID NO: 3882 - DNA, 20 bp, Homo sapiens
gggtccattccgatggctgg

SEQ ID NO: 3883 - DNA, 20 bp, Homo sapiens
ggggtccattccgatggctg

SEQ ID NO: 3884 - DNA, 20 bp, Homo sapiens
aagcccactcccccagccat

SEQ ID NO: 3885 - DNA, 20 bp, Homo sapiens
aggggtccattccgatggct

SEQ ID NO: 3886 - DNA, 20 bp, Homo sapiens
gaggggtccattccgatggc

SEQ ID NO: 3887 - DNA, 20 bp, Homo sapiens
cactcccccagccatcggaa

SEQ ID NO: 3888 - DNA, 20 bp, Homo sapiens
agaggaggggtccattccga

SEQ ID NO: 3889 - DNA, 20 bp, Homo sapiens
agtgccctggccaagaggag

SEQ ID NO: 3890 - DNA, 20 bp, Homo sapiens
tcggaatggacccctcctct

SEQ ID NO: 3891 - DNA, 20 bp, Homo sapiens
gagtgccctggccaagagga

SEQ ID NO: 3892 - DNA, 20 bp, Homo sapiens
ggagtgccctggccaagagg

SEQ ID NO: 3893 - DNA, 20 bp, Homo sapiens
tttggagtgccctggccaag

SEQ ID NO: 3894 - DNA, 20 bp, Homo sapiens
atggacccctcctcttggcc

SEQ ID NO: 3895 - DNA, 20 bp, Homo sapiens
tggacccctcctcttggcca

SEQ ID NO: 3896 - DNA, 20 bp, Homo sapiens
aggttaactttggagtgccc

SEQ ID NO: 3897 - DNA, 20 bp, Homo sapiens
ccggtttttcaggttaactt

SEQ ID NO: 3898 - DNA, 20 bp, Homo sapiens
acagcctgaaccggtttttc

SEQ ID NO: 3899 - DNA, 20 bp, Homo sapiens
ccaaagttaacctgaaaaac

SEQ ID NO: 3900 - DNA, 20 bp, Homo sapiens
ttaacctgaaaaaccggttc

SEQ ID NO: 3901 - DNA, 20 bp, Homo sapiens
cttctcttcacagcctgaac

SEQ ID NO: 3902 - DNA, 20 bp, Homo sapiens
cggttcaggctgtgaagaga

SEQ ID NO: 3903 - DNA, 20 bp, Homo sapiens
ttcaggctgtgaagagaagg

SEQ ID NO: 3904 - DNA, 20 bp, Homo sapiens
gctgtgaagagaaggtggag

SEQ ID NO: 3905 - DNA, 20 bp, Homo sapiens
aagggaggaggacataaatg

SEQ ID NO: 3906 - DNA, 20 bp, Homo sapiens
gctgaattccaaaagggagg

SEQ ID NO: 3907 - DNA, 20 bp, Homo sapiens
atttatgtcctcctcccttt

SEQ ID NO: 3908 - DNA, 20 bp, Homo sapiens
tttgctgaattccaaaaggg

SEQ ID NO: 3909 - DNA, 20 bp, Homo sapiens
agctttgctgaattccaaaa

SEQ ID NO: 3910 - DNA, 20 bp, Homo sapiens
cagctttgctgaattccaaa

SEQ ID NO: 3911 - DNA, 20 bp, Homo sapiens
gtctgtgttaatgttcatgc

SEQ ID NO: 3912 - DNA, 20 bp, Homo sapiens
aatgccactaatcagactta

SEQ ID NO: 3913 - DNA, 20 bp, Homo sapiens
cagaccttaagtctgattag

SEQ ID NO: 3914 - DNA, 20 bp, Homo sapiens
actctctgaagcgtgctacc

SEQ ID NO: 3915 - DNA, 20 bp, Homo sapiens
atcatgcaaaggaagactcc

SEQ ID NO: 3916 - DNA, 20 bp, Homo sapiens
accaaagttttatcatgcaa

SEQ ID NO: 3917 - DNA, 20 bp, Homo sapiens
tcctttgcatgataaaactt

SEQ ID NO: 3918 - DNA, 20 bp, Homo sapiens
taggttatgataaggggttg

SEQ ID NO: 3919 - DNA, 20 bp, Homo sapiens
agtgtctaggttatgataag

SEQ ID NO: 3920 - DNA, 20 bp, Homo sapiens
gagtgtctaggttatgataa

SEQ ID NO: 3921 - DNA, 20 bp, Homo sapiens
ggagtgtctaggttatgata

SEQ ID NO: 3922 - DNA, 20 bp, Homo sapiens
atcactagaaaggagtgtct

SEQ ID NO: 3923 - DNA, 20 bp, Homo sapiens
aagagttattatcactagaa

SEQ ID NO: 3924 - DNA, 20 bp, Homo sapiens
aaaatttttttattggcaat

SEQ ID NO: 3925 - DNA, 20 bp, Homo sapiens
tagattcaaaatttttttat

SEQ ID NO: 3926 - DNA, 20 bp, Homo sapiens
ttttgaatctacctataacc

SEQ ID NO: 3927 - DNA, 20 bp, Homo sapiens
gcggggaggttccaggttat

SEQ ID NO: 3928 - DNA, 20 bp, Homo sapiens
aggtggagcggggaggttcc

SEQ ID NO: 3929 - DNA, 20 bp, Homo sapiens
aactcgaaggtggagcgggg

SEQ ID NO: 3930 - DNA, 20 bp, Homo sapiens
gacaactcgaaggtggagcg

SEQ ID NO: 3931 - DNA, 20 bp, Homo sapiens
ggacaactcgaaggtggagc

SEQ ID NO: 3932 - DNA, 20 bp, Homo sapiens
aggacaactcgaaggtggag

SEQ ID NO: 3933 - DNA, 20 bp, Homo sapiens
aaggtaggacaactcgaagg

SEQ ID NO: 3934 - DNA, 20 bp, Homo sapiens
agaaaggtaggacaactcga

SEQ ID NO: 3935 - DNA, 20 bp, Homo sapiens
ttgcttctgtccagaaaggt

SEQ ID NO: 3936 - DNA, 20 bp, Homo sapiens
ttcgagttgtcctacctttc

SEQ ID NO: 3937 - DNA, 20 bp, Homo sapiens
cacattgcttctgtccagaa

SEQ ID NO: 3938 - DNA, 20 bp, Homo sapiens
ctttctggacagaagcaatg

SEQ ID NO: 3939 - DNA, 20 bp, Homo sapiens
gcctaattgtatacatttta

SEQ ID NO: 3940 - DNA, 20 bp, Homo sapiens
agcctaattgtatacatttt

SEQ ID NO: 3941 - DNA, 20 bp, Homo sapiens
tccctaaaatgtatacaatt

SEQ ID NO: 3942 - DNA, 20 bp, Homo sapiens
acatgtgcccagggtgatct

SEQ ID NO: 3943 - DNA, 20 bp, Homo sapiens
aacatgtgcccagggtgatc

SEQ ID NO: 3944 - DNA, 20 bp, Homo sapiens
aggctgtgcccagatcaccc

SEQ ID NO: 3945 - DNA, 20 bp, Homo sapiens
ggctgtgcccagatcaccct

SEQ ID NO: 3946 - DNA, 20 bp, Homo sapiens
ggcctgagaacatgtgccca

SEQ ID NO: 3947 - DNA, 20 bp, Homo sapiens
gggcctgagaacatgtgccc

SEQ ID NO: 3948 - DNA, 20 bp, Homo sapiens
caccctgggcacatgttctc

SEQ ID NO: 3949 - DNA, 20 bp, Homo sapiens
catgttctcaggccctcctg

SEQ ID NO: 3950 - DNA, 20 bp, Homo sapiens
ccgagacagagacctcagga

SEQ ID NO: 3951 - DNA, 20 bp, Homo sapiens
cccgagacagagacctcagg

SEQ ID NO: 3952 - DNA, 20 bp, Homo sapiens
tggcccgagacagagacctc

SEQ ID NO: 3953 - DNA, 20 bp, Homo sapiens
ccctcctgaggtctctgtct

SEQ ID NO: 3954 - DNA, 20 bp, Homo sapiens
cctcctgaggtctctgtctc

SEQ ID NO: 3955 - DNA, 20 bp, Homo sapiens
aggtctctgtctcgggccat

SEQ ID NO: 3956 - DNA, 20 bp, Homo sapiens
agccgaatctgagtgaccaa

SEQ ID NO: 3957 - DNA, 20 bp, Homo sapiens
ggccattggtcactcagatt

SEQ ID NO: 3958 - DNA, 20 bp, Homo sapiens
gataccgtcggagccggcaa

SEQ ID NO: 3959 - DNA, 20 bp, Homo sapiens
gtgcttgataccgtcggagc

SEQ ID NO: 3960 - DNA, 20 bp, Homo sapiens
ctgctggtgcttgataccgt

SEQ ID NO: 3961 - DNA, 20 bp, Homo sapiens
ctgcggttcctaccggttct

SEQ ID NO: 3962 - DNA, 20 bp, Homo sapiens
gtctccggaaactcgaggtg

SEQ ID NO: 3963 - DNA, 20 bp, Homo sapiens
acggcattcttcctttcgat

SEQ ID NO: 3964 - DNA, 20 bp, Homo sapiens
ggaggcgctgcggttcctac

SEQ ID NO: 3965 - DNA, 20 bp, Homo sapiens
gctgtgtctccggaaactcg

SEQ ID NO: 3966 - DNA, 20 bp, Homo sapiens
ctatgctgtagcagtcagcg

SEQ ID NO: 3967 - DNA, 20 bp, Homo sapiens
gctgggctgatctccgtcgg

SEQ ID NO: 3968 - DNA, 20 bp, Homo sapiens
gcttcctcacctcgagtttc

SEQ ID NO: 3969 - DNA, 20 bp, Homo sapiens
tcctccgttccctcgggtag

SEQ ID NO: 3970 - DNA, 20 bp, Homo sapiens
gggctacaacttcagcttgc

SEQ ID NO: 3971 - DNA, 20 bp, Homo sapiens
cgtgatggcggccattggct

SEQ ID NO: 3972 - DNA, 20 bp, Homo sapiens
gctgactgctacagcatagt

SEQ ID NO: 3973 - DNA, 20 bp, Homo sapiens
tggctgggctgatctccgtc

SEQ ID NO: 3974 - DNA, 20 bp, Homo sapiens
aaagcctctacccgagggaa

SEQ ID NO: 3975 - DNA, 20 bp, Homo sapiens
tgctgagaagtccaatcgaa

SEQ ID NO: 3976 - DNA, 20 bp, Homo sapiens
ggctacaacttcagcttgct

SEQ ID NO: 3977 - DNA, 20 bp, Homo sapiens
cgagtttccggagacacagc

SEQ ID NO: 3978 - DNA, 20 bp, Homo sapiens
ggcagcgccggacagaccgc

SEQ ID NO: 3979 - DNA, 20 bp, Homo sapiens
aggcagcgccggacagaccg

SEQ ID NO: 3980 - DNA, 20 bp, Homo sapiens
ctaagtacccgcggtctgtc

SEQ ID NO: 3981 - DNA, 20 bp, Homo sapiens
cccagaggggcaggcagcgc

SEQ ID NO: 3982 - DNA, 20 bp, Homo sapiens
gtgttagggcccagaggggc

SEQ ID NO: 3983 - DNA, 20 bp, Homo sapiens
tccggcgctgcctgcccctc

SEQ ID NO: 3984 - DNA, 20 bp, Homo sapiens
ccggcgctgcctgcccctct

SEQ ID NO: 3985 - DNA, 20 bp, Homo sapiens
tccagtgttagggcccagag

SEQ ID NO: 3986 - DNA, 20 bp, Homo sapiens
ttccagtgttagggcccaga

SEQ ID NO: 3987 - DNA, 20 bp, Homo sapiens
cttccagtgttagggcccag

SEQ ID NO: 3988 - DNA, 20 bp, Homo sapiens
gcccctctgggccctaacac

SEQ ID NO: 3989 - DNA, 20 bp, Homo sapiens
gagagctgcttccagtgtta

SEQ ID NO: 3990 - DNA, 20 bp, Homo sapiens
tgagagctgcttccagtgtt

SEQ ID NO: 3991 - DNA, 20 bp, Homo sapiens
agtgggtaaaaaaatagaag

SEQ ID NO: 3992 - DNA, 20 bp, Homo sapiens
ctctaaggaagcgtcatagt

SEQ ID NO: 3993 - DNA, 20 bp, Homo sapiens
cctctaaggaagcgtcatag

SEQ ID NO: 3994 - DNA, 20 bp, Homo sapiens
ccactatgacgcttccttag

SEQ ID NO: 3995 - DNA, 20 bp, Homo sapiens
gagccccttttgatcctcta

SEQ ID NO: 3996 - DNA, 20 bp, Homo sapiens
cgcttccttagaggatcaaa

SEQ ID NO: 3997 - DNA, 20 bp, Homo sapiens
gcttccttagaggatcaaaa

SEQ ID NO: 3998 - DNA, 20 bp, Homo sapiens
cttccttagaggatcaaaag

SEQ ID NO: 3999 - DNA, 20 bp, Homo sapiens
agaggatcaaaaggggctcg

SEQ ID NO: 4000 - DNA, 20 bp, Homo sapiens
ccgccatcacggtcagatct

SEQ ID NO: 4001 - DNA, 20 bp, Homo sapiens
tggccaagatctgaccgtga

SEQ ID NO: 4002 - DNA, 20 bp, Homo sapiens
ccaagatctgaccgtgatgg

SEQ ID NO: 4003 - DNA, 20 bp, Homo sapiens
caagccaatggccgccatca

SEQ ID NO: 4004 - DNA, 20 bp, Homo sapiens
ctgaccgtgatggcggccat

SEQ ID NO: 4005 - DNA, 20 bp, Homo sapiens
cgtgatggcggccattggct

SEQ ID NO: 4006 - DNA, 20 bp, Homo sapiens
ggtgaggaagcccaagccaa

SEQ ID NO: 4007 - DNA, 20 bp, Homo sapiens
gtgatggcggccattggctt

SEQ ID NO: 4008 - DNA, 20 bp, Homo sapiens
gtctccggaaactcgaggtg

SEQ ID NO: 4009 - DNA, 20 bp, Homo sapiens
gctgtgtctccggaaactcg

SEQ ID NO: 4010 - DNA, 20 bp, Homo sapiens
gcttcctcacctcgagtttc

SEQ ID NO: 4011 - DNA, 20 bp, Homo sapiens
cactgctccagctgtgtctc

SEQ ID NO: 4012 - DNA, 20 bp, Homo sapiens
cgagtttccggagacacagc

SEQ ID NO: 4013 - DNA, 20 bp, Homo sapiens
gagacacagctggagcagtg

SEQ ID NO: 4014 - DNA, 20 bp, Homo sapiens
cgccagcatgaagaggttga

SEQ ID NO: 4015 - DNA, 20 bp, Homo sapiens
caccaagcgccagcatgaag

SEQ ID NO: 4016 - DNA, 20 bp, Homo sapiens
ggccttcaacctcttcatgc

SEQ ID NO: 4017 - DNA, 20 bp, Homo sapiens
aacctcttcatgctggcgct

SEQ ID NO: 4018 - DNA, 20 bp, Homo sapiens
tgctggcgcttggtgtgcag

SEQ ID NO: 4019 - DNA, 20 bp, Homo sapiens
gctggcgcttggtgtgcagt

SEQ ID NO: 4020 - DNA, 20 bp, Homo sapiens
tgtgcagtgggcaatcctgc

SEQ ID NO: 4021 - DNA, 20 bp, Homo sapiens
cagtgggcaatcctgctgga

SEQ ID NO: 4022 - DNA, 20 bp, Homo sapiens
ggctcaggaagccgtccagc

SEQ ID NO: 4023 - DNA, 20 bp, Homo sapiens
tcccagaagggaactggctc

SEQ ID NO: 4024 - DNA, 20 bp, Homo sapiens
ccaccttcccagaagggaac

SEQ ID NO: 4025 - DNA, 20 bp, Homo sapiens
ttcctgagccagttcccttc

SEQ ID NO: 4026 - DNA, 20 bp, Homo sapiens
tcctgagccagttcccttct

SEQ ID NO: 4027 - DNA, 20 bp, Homo sapiens
tgatgaccaccttcccagaa

SEQ ID NO: 4028 - DNA, 20 bp, Homo sapiens
gtgatgaccaccttcccaga

SEQ ID NO: 4029 - DNA, 20 bp, Homo sapiens
gagccagttcccttctggga

SEQ ID NO: 4030 - DNA, 20 bp, Homo sapiens
ccagttcccttctgggaagg

SEQ ID NO: 4031 - DNA, 20 bp, Homo sapiens
caccgacaaagcactcatgg

SEQ ID NO: 4032 - DNA, 20 bp, Homo sapiens
cagcaccgacaaagcactca

SEQ ID NO: 4033 - DNA, 20 bp, Homo sapiens
ggccaccatgagtgctttgt

SEQ ID NO: 4034 - DNA, 20 bp, Homo sapiens
tttgtcggtgctgatctcag

SEQ ID NO: 4035 - DNA, 20 bp, Homo sapiens
gatctcagtggatgctgtct

SEQ ID NO: 4036 - DNA, 20 bp, Homo sapiens
atctcagtggatgctgtctt

SEQ ID NO: 4037 - DNA, 20 bp, Homo sapiens
tctcagtggatgctgtcttg

SEQ ID NO: 4038 - DNA, 20 bp, Homo sapiens
agtggatgctgtcttgggga

SEQ ID NO: 4039 - DNA, 20 bp, Homo sapiens
tgtcttggggaaggtcaact

SEQ ID NO: 4040 - DNA, 20 bp, Homo sapiens
gaaggtcaacttggcgcagt

SEQ ID NO: 4041 - DNA, 20 bp, Homo sapiens
ggtcaacttggcgcagttgg

SEQ ID NO: 4042 - DNA, 20 bp, Homo sapiens
cttggcgcagttggtggtga

SEQ ID NO: 4043 - DNA, 20 bp, Homo sapiens
gcagttggtggtgatggtgc

SEQ ID NO: 4044 - DNA, 20 bp, Homo sapiens
gttggtggtgatggtgctgg

SEQ ID NO: 4045 - DNA, 20 bp, Homo sapiens
ggtggtgatggtgctggtgg

SEQ ID NO: 4046 - DNA, 20 bp, Homo sapiens
ctggtggaggtgacagcttt

SEQ ID NO: 4047 - DNA, 20 bp, Homo sapiens
tgacagctttaggcaacctg

SEQ ID NO: 4048 - DNA, 20 bp, Homo sapiens
agctttaggcaacctgagga

SEQ ID NO: 4049 - DNA, 20 bp, Homo sapiens
tattactgatgaccatcctc

SEQ ID NO: 4050 - DNA, 20 bp, Homo sapiens
agatgtgcatcatgttcatg

SEQ ID NO: 4051 - DNA, 20 bp, Homo sapiens
tacgtgttcgcagcctattt

SEQ ID NO: 4052 - DNA, 20 bp, Homo sapiens
acgtgttcgcagcctatttt

SEQ ID NO: 4053 - DNA, 20 bp, Homo sapiens
ggccacagacagcccaaaat

SEQ ID NO: 4054 - DNA, 20 bp, Homo sapiens
agcctattttgggctgtctg

SEQ ID NO: 4055 - DNA, 20 bp, Homo sapiens
attttgggctgtctgtggcc

SEQ ID NO: 4056 - DNA, 20 bp, Homo sapiens
tagaggctttggcaggcacc

SEQ ID NO: 4057 - DNA, 20 bp, Homo sapiens
cctcgggtagaggctttggc

SEQ ID NO: 4058 - DNA, 20 bp, Homo sapiens
gttccctcgggtagaggctt

SEQ ID NO: 4059 - DNA, 20 bp, Homo sapiens
tcctccgttccctcgggtag

SEQ ID NO: 4060 - DNA, 20 bp, Homo sapiens
cctgccaaagcctctacccg

SEQ ID NO: 4061 - DNA, 20 bp, Homo sapiens
ctgccaaagcctctacccga

SEQ ID NO: 4062 - DNA, 20 bp, Homo sapiens
tctttatcctccgttccctc

SEQ ID NO: 4063 - DNA, 20 bp, Homo sapiens
aaagcctctacccgagggaa

SEQ ID NO: 4064 - DNA, 20 bp, Homo sapiens
atctttatcctccgttccct

SEQ ID NO: 4065 - DNA, 20 bp, Homo sapiens
gcctctacccgagggaacgg

SEQ ID NO: 4066 - DNA, 20 bp, Homo sapiens
acccagtttgtctgccatgc

SEQ ID NO: 4067 - DNA, 20 bp, Homo sapiens
ccagaacatccacaagaaga

SEQ ID NO: 4068 - DNA, 20 bp, Homo sapiens
gccagaacatccacaagaag

SEQ ID NO: 4069 - DNA, 20 bp, Homo sapiens
ccctcttcttgtggatgttc

SEQ ID NO: 4070 - DNA, 20 bp, Homo sapiens
agcagagcagagttgaaact

SEQ ID NO: 4071 - DNA, 20 bp, Homo sapiens
tgctgagaagtccaatcgaa

SEQ ID NO: 4072 - DNA, 20 bp, Homo sapiens
acggcattcttcctttcgat

SEQ ID NO: 4073 - DNA, 20 bp, Homo sapiens
agcatagtaggtgttgaaca

SEQ ID NO: 4074 - DNA, 20 bp, Homo sapiens
gctgactgctacagcatagt

SEQ ID NO: 4075 - DNA, 20 bp, Homo sapiens
ctatgctgtagcagtcagcg

SEQ ID NO: 4076 - DNA, 20 bp, Homo sapiens
agcgtggtgacagccatctc

SEQ ID NO: 4077 - DNA, 20 bp, Homo sapiens
gcgtggtgacagccatctca

SEQ ID NO: 4078 - DNA, 20 bp, Homo sapiens
agccaaggatgaccctgaga

SEQ ID NO: 4079 - DNA, 20 bp, Homo sapiens
agccatctcagggtcatcct

SEQ ID NO: 4080 - DNA, 20 bp, Homo sapiens
cttcccttgggggtgagcca

SEQ ID NO: 4081 - DNA, 20 bp, Homo sapiens
tcatccttggctcaccccca

SEQ ID NO: 4082 - DNA, 20 bp, Homo sapiens
catccttggctcacccccaa

SEQ ID NO: 4083 - DNA, 20 bp, Homo sapiens
ttatgtgcacagtgcggtgt

SEQ ID NO: 4084 - DNA, 20 bp, Homo sapiens
gtgcacagtgcggtgttggc

SEQ ID NO: 4085 - DNA, 20 bp, Homo sapiens
cacagtgcggtgttggcagg

SEQ ID NO: 4086 - DNA, 20 bp, Homo sapiens
tgcggtgttggcaggaggcg

SEQ ID NO: 4087 - DNA, 20 bp, Homo sapiens
gttggcaggaggcgtggctg

SEQ ID NO: 4088 - DNA, 20 bp, Homo sapiens
ttggcaggaggcgtggctgt

SEQ ID NO: 4089 - DNA, 20 bp, Homo sapiens
agaagggatcaggtgacacg

SEQ ID NO: 4090 - DNA, 20 bp, Homo sapiens
caagccacggagaagggatc

SEQ ID NO: 4091 - DNA, 20 bp, Homo sapiens
ccatggcaagccacggagaa

SEQ ID NO: 4092 - DNA, 20 bp, Homo sapiens
gtcacctgatcccttctccg

SEQ ID NO: 4093 - DNA, 20 bp, Homo sapiens
accatggcaagccacggaga

SEQ ID NO: 4094 - DNA, 20 bp, Homo sapiens
cccagcaccatggcaagcca

SEQ ID NO: 4095 - DNA, 20 bp, Homo sapiens
cccttctccgtggcttgcca

SEQ ID NO: 4096 - DNA, 20 bp, Homo sapiens
tccgtggcttgccatggtgc

SEQ ID NO: 4097 - DNA, 20 bp, Homo sapiens
agccacaagacccagcacca

SEQ ID NO: 4098 - DNA, 20 bp, Homo sapiens
ccgtggcttgccatggtgct

SEQ ID NO: 4099 - DNA, 20 bp, Homo sapiens
tgccatggtgctgggtcttg

SEQ ID NO: 4100 - DNA, 20 bp, Homo sapiens
atggtgctgggtcttgtggc

SEQ ID NO: 4101 - DNA, 20 bp, Homo sapiens
tggtgctgggtcttgtggct

SEQ ID NO: 4102 - DNA, 20 bp, Homo sapiens
gtggctgggctgatctccgt

SEQ ID NO: 4103 - DNA, 20 bp, Homo sapiens
tggctgggctgatctccgtc

SEQ ID NO: 4104 - DNA, 20 bp, Homo sapiens
ggctgggctgatctccgtcg

SEQ ID NO: 4105 - DNA, 20 bp, Homo sapiens
gctgggctgatctccgtcgg

SEQ ID NO: 4106 - DNA, 20 bp, Homo sapiens
caggtacttggctcccccga

SEQ ID NO: 4107 - DNA, 20 bp, Homo sapiens
gggtgttgtaaccgagtgct

SEQ ID NO: 4108 - DNA, 20 bp, Homo sapiens
tgtggggaatccccagcact

SEQ ID NO: 4109 - DNA, 20 bp, Homo sapiens
ggtgttgtaaccgagtgctg

SEQ ID NO: 4110 - DNA, 20 bp, Homo sapiens
tagcccatgatggagctgtg

SEQ ID NO: 4111 - DNA, 20 bp, Homo sapiens
gtagcccatgatggagctgt

SEQ ID NO: 4112 - DNA, 20 bp, Homo sapiens
tgtagcccatgatggagctg

SEQ ID NO: 4113 - DNA, 20 bp, Homo sapiens
gattccccacagctccatca

SEQ ID NO: 4114 - DNA, 20 bp, Homo sapiens
attccccacagctccatcat

SEQ ID NO: 4115 - DNA, 20 bp, Homo sapiens
gctgaagttgtagcccatga

SEQ ID NO: 4116 - DNA, 20 bp, Homo sapiens
gggctacaacttcagcttgc

SEQ ID NO: 4117 - DNA, 20 bp, Homo sapiens
ggctacaacttcagcttgct

SEQ ID NO: 4118 - DNA, 20 bp, Homo sapiens
ttcagcttgctgggtctgct

SEQ ID NO: 4119 - DNA, 20 bp, Homo sapiens
gatcatctacattgtgctgc

SEQ ID NO: 4120 - DNA, 20 bp, Homo sapiens
ctgctggtgcttgataccgt

SEQ ID NO: 4121 - DNA, 20 bp, Homo sapiens
gtgcttgataccgtcggagc

SEQ ID NO: 4122 - DNA, 20 bp, Homo sapiens
gataccgtcggagccggcaa

SEQ ID NO: 4123 - DNA, 20 bp, Homo sapiens
cttcagccatttttacagcc

SEQ ID NO: 4124 - DNA, 20 bp, Homo sapiens
ctggaacctggctgtaaaaa

SEQ ID NO: 4125 - DNA, 20 bp, Homo sapiens
gctgtaaaaatggctgaagc

SEQ ID NO: 4126 - DNA, 20 bp, Homo sapiens
aatggctgaagcaggtgatg

SEQ ID NO: 4127 - DNA, 20 bp, Homo sapiens
tgatgaggagctgatgcgtt

SEQ ID NO: 4128 - DNA, 20 bp, Homo sapiens
gacgtgtctcagagaaatca

SEQ ID NO: 4129 - DNA, 20 bp, Homo sapiens
gtgtctcagagaaatcatgg

SEQ ID NO: 4130 - DNA, 20 bp, Homo sapiens
gagaaatcatggaggcgctg

SEQ ID NO: 4131 - DNA, 20 bp, Homo sapiens
ggaggcgctgcggttcctac

SEQ ID NO: 4132 - DNA, 20 bp, Homo sapiens
gaaggcatccaagaaccggt

SEQ ID NO: 4133 - DNA, 20 bp, Homo sapiens
ctgcggttcctaccggttct

SEQ ID NO: 4134 - DNA, 20 bp, Homo sapiens
tgtagaaggcatccaagaac

SEQ ID NO: 4135 - DNA, 20 bp, Homo sapiens
gctatggttgtctctgtaga

SEQ ID NO: 4136 - DNA, 20 bp, Homo sapiens
atccctataatttggggcta

SEQ ID NO: 4137 - DNA, 20 bp, Homo sapiens
tatgtgatccctataatttg

SEQ ID NO: 4138 - DNA, 20 bp, Homo sapiens
atatgtgatccctataattt

SEQ ID NO: 4139 - DNA, 20 bp, Homo sapiens
caaccatagccccaaattat

SEQ ID NO: 4140 - DNA, 20 bp, Homo sapiens
gatatgtgatccctataatt

SEQ ID NO: 4141 - DNA, 20 bp, Homo sapiens
aaccatagccccaaattata

SEQ ID NO: 4142 - DNA, 20 bp, Homo sapiens
ttatagggatcacatatcag

SEQ ID NO: 4143 - DNA, 20 bp, Homo sapiens
ccccaatgctgaggaggacc

SEQ ID NO: 4144 - DNA, 20 bp, Homo sapiens
tgagttccccaatgctgagg

SEQ ID NO: 4145 - DNA, 20 bp, Homo sapiens
ttccaggtcctcctcagcat

SEQ ID NO: 4146 - DNA, 20 bp, Homo sapiens
agctgagttccccaatgctg

SEQ ID NO: 4147 - DNA, 20 bp, Homo sapiens
tccaggtcctcctcagcatt

SEQ ID NO: 4148 - DNA, 20 bp, Homo sapiens
ccaggtcctcctcagcattg

SEQ ID NO: 4149 - DNA, 20 bp, Homo sapiens
cagcattggggaactcagct

SEQ ID NO: 4150 - DNA, 20 bp, Homo sapiens
tggttgtgctggcctctcta

SEQ ID NO: 4151 - DNA, 20 bp, Homo sapiens
ggctgcaaggctggttgtgc

SEQ ID NO: 4152 - DNA, 20 bp, Homo sapiens
cttatctcaggctgcaaggc

SEQ ID NO: 4153 - DNA, 20 bp, Homo sapiens
aggccttatctcaggctgca

SEQ ID NO: 4154 - DNA, 20 bp, Homo sapiens
cagccttgcagcctgagata

SEQ ID NO: 4155 - DNA, 20 bp, Homo sapiens
cccgccaaaggccttatctc

SEQ ID NO: 4156 - DNA, 20 bp, Homo sapiens
gcagcctgagataaggcctt

SEQ ID NO: 4157 - DNA, 20 bp, Homo sapiens
gcctgagataaggcctttgg

SEQ ID NO: 4158 - DNA, 20 bp, Homo sapiens
cctgagataaggcctttggc

SEQ ID NO: 4159 - DNA, 20 bp, Homo sapiens
ataggggagacacccgccaa

SEQ ID NO: 4160 - DNA, 20 bp, Homo sapiens
agggcttgagggagcgatag

SEQ ID NO: 4161 - DNA, 20 bp, Homo sapiens
gagggcttgagggagcgata

SEQ ID NO: 4162 - DNA, 20 bp, Homo sapiens
tgagggcttgagggagcgat

SEQ ID NO: 4163 - DNA, 20 bp, Homo sapiens
acacctacttgagggcttga

SEQ ID NO: 4164 - DNA, 20 bp, Homo sapiens
aacacctacttgagggcttg

SEQ ID NO: 4165 - DNA, 20 bp, Homo sapiens
gctccctcaagccctcaagt

SEQ ID NO: 4166 - DNA, 20 bp, Homo sapiens
tctctccaacacctacttga

SEQ ID NO: 4167 - DNA, 20 bp, Homo sapiens
ctctctccaacacctacttg

SEQ ID NO: 4168 - DNA, 20 bp, Homo sapiens
tcaagccctcaagtaggtgt

SEQ ID NO: 4169 - DNA, 20 bp, Homo sapiens
ctcaagtaggtgttggagag

SEQ ID NO: 4170 - DNA, 20 bp, Homo sapiens
tcaagtaggtgttggagaga

SEQ ID NO: 4171 - DNA, 20 bp, Homo sapiens
caagtaggtgttggagagag

SEQ ID NO: 4172 - DNA, 20 bp, Homo sapiens
ttggagagaggggtgatgcc

SEQ ID NO: 4173 - DNA, 20 bp, Homo sapiens
agaggggtgatgcctggtgc

SEQ ID NO: 4174 - DNA, 20 bp, Homo sapiens
gcaggggttccaccagcacc

SEQ ID NO: 4175 - DNA, 20 bp, Homo sapiens
ggggtgatgcctggtgctgg

SEQ ID NO: 4176 - DNA, 20 bp, Homo sapiens
ctgtgtccgtctctgtgcag

SEQ ID NO: 4177 - DNA, 20 bp, Homo sapiens
cctgtgtccgtctctgtgca

SEQ ID NO: 4178 - DNA, 20 bp, Homo sapiens
tcctgtgtccgtctctgtgc

SEQ ID NO: 4179 - DNA, 20 bp, Homo sapiens
gtggaacccctgcacagaga

SEQ ID NO: 4180 - DNA, 20 bp, Homo sapiens
ccctgcacagagacggacac

SEQ ID NO: 4181 - DNA, 20 bp, Homo sapiens
ggatgagctctaagtacccg

SEQ ID NO: 4182 - DNA, 20 bp, Homo sapiens
ggcagcgccggacagaccgc

SEQ ID NO: 4183 - DNA, 20 bp, Homo sapiens
aggcagcgccggacagaccg

SEQ ID NO: 4184 - DNA, 20 bp, Homo sapiens
ctaagtacccgcggtctgtc

SEQ ID NO: 4185 - DNA, 20 bp, Homo sapiens
cccagaggggcaggcagcgc

SEQ ID NO: 4186 - DNA, 20 bp, Homo sapiens
gtgttagggcccagaggggc

SEQ ID NO: 4187 - DNA, 20 bp, Homo sapiens
tccggcgctgcctgcccctc

SEQ ID NO: 4188 - DNA, 20 bp, Homo sapiens
ccggcgctgcctgcccctct

SEQ ID NO: 4189 - DNA, 20 bp, Homo sapiens
tccagtgttagggcccagag

SEQ ID NO: 4190 - DNA, 20 bp, Homo sapiens
ttccagtgttagggcccaga

SEQ ID NO: 4191 - DNA, 20 bp, Homo sapiens
cttccagtgttagggcccag

SEQ ID NO: 4192 - DNA, 20 bp, Homo sapiens
gcccctctgggccctaacac

SEQ ID NO: 4193 - DNA, 20 bp, Homo sapiens
gagagctgcttccagtgtta

SEQ ID NO: 4194 - DNA, 20 bp, Homo sapiens
tgagagctgcttccagtgtt

SEQ ID NO: 4195 - DNA, 20 bp, Homo sapiens
agtgggtaaaaaaatagaag

SEQ ID NO: 4196 - DNA, 20 bp, Homo sapiens
ctctaaggaagcgtcatagt

SEQ ID NO: 4197 - DNA, 20 bp, Homo sapiens
cctctaaggaagcgtcatag

SEQ ID NO: 4198 - DNA, 20 bp, Homo sapiens
ccactatgacgcttccttag

SEQ ID NO: 4199 - DNA, 20 bp, Homo sapiens
gagccccttttgatcctcta

SEQ ID NO: 4200 - DNA, 20 bp, Homo sapiens
cgcttccttagaggatcaaa

SEQ ID NO: 4201 - DNA, 20 bp, Homo sapiens
gcttccttagaggatcaaaa

SEQ ID NO: 4202 - DNA, 20 bp, Homo sapiens
cttccttagaggatcaaaag

SEQ ID NO: 4203 - DNA, 20 bp, Homo sapiens
agaggatcaaaaggggctcg

SEQ ID NO: 4204 - DNA, 20 bp, Homo sapiens
gggctcgtggcatcctatca

SEQ ID NO: 4205 - DNA, 20 bp, Homo sapiens
caatgaactctcaccttgat

SEQ ID NO: 4206 - DNA, 20 bp, Homo sapiens
ctatcaaggtgagagttcat

SEQ ID NO: 4207 - DNA, 20 bp, Homo sapiens
gtgagagttcattggaaaag

SEQ ID NO: 4208 - DNA, 20 bp, Homo sapiens
ttcattggaaaagtggtcac

SEQ ID NO: 4209 - DNA, 20 bp, Homo sapiens
tggtcacaggagcaaatagc

SEQ ID NO: 4210 - DNA, 20 bp, Homo sapiens
ggtcacaggagcaaatagca

SEQ ID NO: 4211 - DNA, 20 bp, Homo sapiens
gtcacaggagcaaatagcag

SEQ ID NO: 4212 - DNA, 20 bp, Homo sapiens
caggagcaaatagcaggggc

SEQ ID NO: 4213 - DNA, 20 bp, Homo sapiens
aggagcaaatagcaggggca

SEQ ID NO: 4214 - DNA, 20 bp, Homo sapiens
ggagcaaatagcaggggcag

SEQ ID NO: 4215 - DNA, 20 bp, Homo sapiens
gcaaatagcaggggcagggg

SEQ ID NO: 4216 - DNA, 20 bp, Homo sapiens
caaatagcaggggcaggggc

SEQ ID NO: 4217 - DNA, 20 bp, Homo sapiens
aaatagcaggggcaggggcg

SEQ ID NO: 4218 - DNA, 20 bp, Homo sapiens
aatagcaggggcaggggcgg

SEQ ID NO: 4219 - DNA, 20 bp, Homo sapiens
agcaggggcaggggcggggg

SEQ ID NO: 4220 - DNA, 20 bp, Homo sapiens
gcaggggcgggggaggcctg

SEQ ID NO: 4221 - DNA, 20 bp, Homo sapiens
ctgtgcccctggagaaccac

SEQ ID NO: 4222 - DNA, 20 bp, Homo sapiens
ggggaggcctgtggttctcc

SEQ ID NO: 4223 - DNA, 20 bp, Homo sapiens
gggaggcctgtggttctcca

SEQ ID NO: 4224 - DNA, 20 bp, Homo sapiens
ggaggcctgtggttctccag

SEQ ID NO: 4225 - DNA, 20 bp, Homo sapiens
gaaaggaacatctgtgcccc

SEQ ID NO: 4226 - DNA, 20 bp, Homo sapiens
ttccttgggattttgtagaa

SEQ ID NO: 4227 - DNA, 20 bp, Homo sapiens
ttcctttctacaaaatccca

SEQ ID NO: 4228 - DNA, 20 bp, Homo sapiens
atgggggaatctttttcctt

SEQ ID NO: 4229 - DNA, 20 bp, Homo sapiens
gatgggggaatctttttcct

SEQ ID NO: 4230 - DNA, 20 bp, Homo sapiens
caatctacggaagaagatgg

SEQ ID NO: 4231 - DNA, 20 bp, Homo sapiens
gcaatctacggaagaagatg

SEQ ID NO: 4232 - DNA, 20 bp, Homo sapiens
tgcaatctacggaagaagat

SEQ ID NO: 4233 - DNA, 20 bp, Homo sapiens
gtgcaatctacggaagaaga

SEQ ID NO: 4234 - DNA, 20 bp, Homo sapiens
ctgaatttcggtgcaatcta

SEQ ID NO: 4235 - DNA, 20 bp, Homo sapiens
ttacattgttggctgaattt

SEQ ID NO: 4236 - DNA, 20 bp, Homo sapiens
taaaggaaagcttacattgt

SEQ ID NO: 4237 - DNA, 20 bp, Homo sapiens
catgcccaggctgcttctaa

SEQ ID NO: 4238 - DNA, 20 bp, Homo sapiens
gctttcctttagaagcagcc

SEQ ID NO: 4239 - DNA, 20 bp, Homo sapiens
ctttcctttagaagcagcct

SEQ ID NO: 4240 - DNA, 20 bp, Homo sapiens
tcacagaagagggcatgccc

SEQ ID NO: 4241 - DNA, 20 bp, Homo sapiens
aaggcaggcttcacagaaga

SEQ ID NO: 4242 - DNA, 20 bp, Homo sapiens
caaggcaggcttcacagaag

SEQ ID NO: 4243 - DNA, 20 bp, Homo sapiens
ctgtgctgaaaaatcaaggc

SEQ ID NO: 4244 - DNA, 20 bp, Homo sapiens
ctcactgtgctgaaaaatca

SEQ ID NO: 4245 - DNA, 20 bp, Homo sapiens
tgatttttcagcacagtgag

SEQ ID NO: 4246 - DNA, 20 bp, Homo sapiens
acagtgagaggcatcctctt

SEQ ID NO: 4247 - DNA, 20 bp, Homo sapiens
gaatttgaggaacaccaaag

SEQ ID NO: 4248 - DNA, 20 bp, Homo sapiens
catttggtagagggaatttg

SEQ ID NO: 4249 - DNA, 20 bp, Homo sapiens
tatgaagaccatttggtaga

SEQ ID NO: 4250 - DNA, 20 bp, Homo sapiens
ttatgaagaccatttggtag

SEQ ID NO: 4251 - DNA, 20 bp, Homo sapiens
ctcaaattccctctaccaaa

SEQ ID NO: 4252 - DNA, 20 bp, Homo sapiens
agagaattatgaagaccatt

SEQ ID NO: 4253 - DNA, 20 bp, Homo sapiens
tgccactgaggagagagaag

SEQ ID NO: 4254 - DNA, 20 bp, Homo sapiens
ttgccactgaggagagagaa

SEQ ID NO: 4255 - DNA, 20 bp, Homo sapiens
cttgccactgaggagagaga

SEQ ID NO: 4256 - DNA, 20 bp, Homo sapiens
ttccccttctctctcctcag

SEQ ID NO: 4257 - DNA, 20 bp, Homo sapiens
aaaaaaattccttgccactg

SEQ ID NO: 4258 - DNA, 20 bp, Homo sapiens
cttctctctcctcagtggca

SEQ ID NO: 4259 - DNA, 20 bp, Homo sapiens
ttttttatttttatagattt

SEQ ID NO: 4260 - DNA, 20 bp, Homo sapiens
tttttatttttatagattta

SEQ ID NO: 4261 - DNA, 20 bp, Homo sapiens
ttttatttttatagatttag

SEQ ID NO: 4262 - DNA, 20 bp, Homo sapiens
tgcaagcaatttcatgttgt

SEQ ID NO: 4263 - DNA, 20 bp, Homo sapiens
gcaagcaatttcatgttgtt

SEQ ID NO: 4264 - DNA, 20 bp, Homo sapiens
atttcatgttgttgggtttt

SEQ ID NO: 4265 - DNA, 20 bp, Homo sapiens
tggtttttgtttcctttttg

SEQ ID NO: 4266 - DNA, 20 bp, Homo sapiens
atgagcgagaggccacaaaa

SEQ ID NO: 4267 - DNA, 20 bp, Homo sapiens
agaaataagaaatgagcgag

SEQ ID NO: 4268 - DNA, 20 bp, Homo sapiens
tcatttcttatttctttttg

SEQ ID NO: 4269 - DNA, 20 bp, Homo sapiens
ttcttatttctttttgaggc

SEQ ID NO: 4270 - DNA, 20 bp, Homo sapiens
tcttatttctttttgaggca

SEQ ID NO: 4271 - DNA, 20 bp, Homo sapiens
agggtctcactctgttgccc

SEQ ID NO: 4272 - DNA, 20 bp, Homo sapiens
atgccactgcacttcagcct

SEQ ID NO: 4273 - DNA, 20 bp, Homo sapiens
catgccactgcacttcagcc

SEQ ID NO: 4274 - DNA, 20 bp, Homo sapiens
ttgcccaggctgaagtgcag

SEQ ID NO: 4275 - DNA, 20 bp, Homo sapiens
gaagtgcagtggcatgatca

SEQ ID NO: 4276 - DNA, 20 bp, Homo sapiens
tgcttgagactaggaggtca

SEQ ID NO: 4277 - DNA, 20 bp, Homo sapiens
gaagattgcttgagactagg

SEQ ID NO: 4278 - DNA, 20 bp, Homo sapiens
tgggaagattgcttgagact

SEQ ID NO: 4279 - DNA, 20 bp, Homo sapiens
gcttcttgggaggctgaggt

SEQ ID NO: 4280 - DNA, 20 bp, Homo sapiens
agcttcttgggaggctgagg

SEQ ID NO: 4281 - DNA, 20 bp, Homo sapiens
cccagcttcttgggaggctg

SEQ ID NO: 4282 - DNA, 20 bp, Homo sapiens
tgtggtcccagcttcttggg

SEQ ID NO: 4283 - DNA, 20 bp, Homo sapiens
tcctgtggtcccagcttctt

SEQ ID NO: 4284 - DNA, 20 bp, Homo sapiens
acctcagcctcccaagaagc

SEQ ID NO: 4285 - DNA, 20 bp, Homo sapiens
ctcctgtggtcccagcttct

SEQ ID NO: 4286 - DNA, 20 bp, Homo sapiens
cctcagcctcccaagaagct

SEQ ID NO: 4287 - DNA, 20 bp, Homo sapiens
tcccaagaagctgggaccac

SEQ ID NO: 4288 - DNA, 20 bp, Homo sapiens
caagaagctgggaccacagg

SEQ ID NO: 4289 - DNA, 20 bp, Homo sapiens
aagaagctgggaccacagga

SEQ ID NO: 4290 - DNA, 20 bp, Homo sapiens
ggcatggtggtgccctcctg

SEQ ID NO: 4291 - DNA, 20 bp, Homo sapiens
aaaaaattagccaggcatgg

SEQ ID NO: 4292 - DNA, 20 bp, Homo sapiens
caggagggcaccaccatgcc

SEQ ID NO: 4293 - DNA, 20 bp, Homo sapiens
aaaaaaaaattagccaggca

SEQ ID NO: 4294 - DNA, 20 bp, Homo sapiens
aaaaaaaaaaaaaattagcc

SEQ ID NO: 4295 - DNA, 20 bp, Homo sapiens
ttttttttttggtagagatg

SEQ ID NO: 4296 - DNA, 20 bp, Homo sapiens
tttttttttggtagagatgt

SEQ ID NO: 4297 - DNA, 20 bp, Homo sapiens
agaccagtctgggaaacaca

SEQ ID NO: 4298 - DNA, 20 bp, Homo sapiens
gagaccagtctgggaaacac

SEQ ID NO: 4299 - DNA, 20 bp, Homo sapiens
tctccctgtgtttcccagac

SEQ ID NO: 4300 - DNA, 20 bp, Homo sapiens
caggagtttgagaccagtct

SEQ ID NO: 4301 - DNA, 20 bp, Homo sapiens
ccaggagtttgagaccagtc

SEQ ID NO: 4302 - DNA, 20 bp, Homo sapiens
ccagactggtctcaaactcc

SEQ ID NO: 4303 - DNA, 20 bp, Homo sapiens
ctggaggatcgcttgtgtcc

SEQ ID NO: 4304 - DNA, 20 bp, Homo sapiens
ctttgggagactgaggctgg

SEQ ID NO: 4305 - DNA, 20 bp, Homo sapiens
gcactttgggagactgaggc

SEQ ID NO: 4306 - DNA, 20 bp, Homo sapiens
tccagcactttgggagactg

SEQ ID NO: 4307 - DNA, 20 bp, Homo sapiens
gcctgtaattccagcacttt

SEQ ID NO: 4308 - DNA, 20 bp, Homo sapiens
gcctcagtctcccaaagtgc

SEQ ID NO: 4309 - DNA, 20 bp, Homo sapiens
cgcctgtaattccagcactt

SEQ ID NO: 4310 - DNA, 20 bp, Homo sapiens
tcccaaagtgctggaattac

SEQ ID NO: 4311 - DNA, 20 bp, Homo sapiens
tagatatgagcaagagagct

SEQ ID NO: 4312 - DNA, 20 bp, Homo sapiens
atagatatgagcaagagagc

SEQ ID NO: 4313 - DNA, 20 bp, Homo sapiens
tatctatactagttttcttt

SEQ ID NO: 4314 - DNA, 20 bp, Homo sapiens
tgggggtggggggtagcaac

SEQ ID NO: 4315 - DNA, 20 bp, Homo sapiens
tcggtgggggtgggggtggg

SEQ ID NO: 4316 - DNA, 20 bp, Homo sapiens
gtcggtgggggtgggggtgg

SEQ ID NO: 4317 - DNA, 20 bp, Homo sapiens
ggtcggtgggggtgggggtg

SEQ ID NO: 4318 - DNA, 20 bp, Homo sapiens
gggtcggtgggggtgggggt

SEQ ID NO: 4319 - DNA, 20 bp, Homo sapiens
ggggtcggtgggggtggggg

SEQ ID NO: 4320 - DNA, 20 bp, Homo sapiens
gctggggtcggtgggggtgg

SEQ ID NO: 4321 - DNA, 20 bp, Homo sapiens
agctggggtcggtgggggtg

SEQ ID NO: 4322 - DNA, 20 bp, Homo sapiens
aagctggggtcggtgggggt

SEQ ID NO: 4323 - DNA, 20 bp, Homo sapiens
aaagctggggtcggtggggg

SEQ ID NO: 4324 - DNA, 20 bp, Homo sapiens
aagaaagctggggtcggtgg

SEQ ID NO: 4325 - DNA, 20 bp, Homo sapiens
gaagaaagctggggtcggtg

SEQ ID NO: 4326 - DNA, 20 bp, Homo sapiens
agaagaaagctggggtcggt

SEQ ID NO: 4327 - DNA, 20 bp, Homo sapiens
gagaagaaagctggggtcgg

SEQ ID NO: 4328 - DNA, 20 bp, Homo sapiens
agtgagaagaaagctggggt

SEQ ID NO: 4329 - DNA, 20 bp, Homo sapiens
cctaagtgagaagaaagctg

SEQ ID NO: 4330 - DNA, 20 bp, Homo sapiens
ccctaagtgagaagaaagct

SEQ ID NO: 4331 - DNA, 20 bp, Homo sapiens
cccctaagtgagaagaaagc

SEQ ID NO: 4332 - DNA, 20 bp, Homo sapiens
ccccagctttcttctcactt

SEQ ID NO: 4333 - DNA, 20 bp, Homo sapiens
cccagctttcttctcactta

SEQ ID NO: 4334 - DNA, 20 bp, Homo sapiens
ccagctttcttctcacttag

SEQ ID NO: 4335 - DNA, 20 bp, Homo sapiens
ctttcttctcacttaggggc

SEQ ID NO: 4336 - DNA, 20 bp, Homo sapiens
tttcttctcacttaggggct

SEQ ID NO: 4337 - DNA, 20 bp, Homo sapiens
tcagccataccttctggttc

SEQ ID NO: 4338 - DNA, 20 bp, Homo sapiens
tctataaatccagaaccaga

SEQ ID NO: 4339 - DNA, 20 bp, Homo sapiens
tccccttcagccataccttc

SEQ ID NO: 4340 - DNA, 20 bp, Homo sapiens
aaatccagaaccagaaggta

SEQ ID NO: 4341 - DNA, 20 bp, Homo sapiens
gaaccagaaggtatggctga

SEQ ID NO: 4342 - DNA, 20 bp, Homo sapiens
aaccagaaggtatggctgaa

SEQ ID NO: 4343 - DNA, 20 bp, Homo sapiens
accagaaggtatggctgaag

SEQ ID NO: 4344 - DNA, 20 bp, Homo sapiens
agaaggtatggctgaagggg

SEQ ID NO: 4345 - DNA, 20 bp, Homo sapiens
gaaggtatggctgaagggga

SEQ ID NO: 4346 - DNA, 20 bp, Homo sapiens
gtatggctgaaggggagggt

SEQ ID NO: 4347 - DNA, 20 bp, Homo sapiens
tgaaggggagggtaggatga

SEQ ID NO: 4348 - DNA, 20 bp, Homo sapiens
cagttgtctcatcacagtct

SEQ ID NO: 4349 - DNA, 20 bp, Homo sapiens
acagttgtctcatcacagtc

SEQ ID NO: 4350 - DNA, 20 bp, Homo sapiens
aataagacagatgtccacaa

SEQ ID NO: 4351 - DNA, 20 bp, Homo sapiens
aaagcaaagtcacaccattg

SEQ ID NO: 4352 - DNA, 20 bp, Homo sapiens
aaaatattgaaatgagtttc

SEQ ID NO: 4353 - DNA, 20 bp, Homo sapiens
atgagtttcaggcatctcag

SEQ ID NO: 4354 - DNA, 20 bp, Homo sapiens
tgagtttcaggcatctcagt

SEQ ID NO: 4355 - DNA, 20 bp, Homo sapiens
aggcatctcagtgggctgat

SEQ ID NO: 4356 - DNA, 20 bp, Homo sapiens
ataggttgttgataatagac

SEQ ID NO: 4357 - DNA, 20 bp, Homo sapiens
taggttgttgataatagaca

SEQ ID NO: 4358 - DNA, 20 bp, Homo sapiens
ctcagggacattcttcaagg

SEQ ID NO: 4359 - DNA, 20 bp, Homo sapiens
tgtctcagggacattcttca

SEQ ID NO: 4360 - DNA, 20 bp, Homo sapiens
caagcttcaactttgtctca

SEQ ID NO: 4361 - DNA, 20 bp, Homo sapiens
tcaagcttcaactttgtctc

SEQ ID NO: 4362 - DNA, 20 bp, Homo sapiens
acaaagttgaagcttgagcc

SEQ ID NO: 4363 - DNA, 20 bp, Homo sapiens
gaacaagcaaggactcaacc

SEQ ID NO: 4364 - DNA, 20 bp, Homo sapiens
tatcaacctaggaacaagca

SEQ ID NO: 4365 - DNA, 20 bp, Homo sapiens
ttgagtccttgcttgttcct

SEQ ID NO: 4366 - DNA, 20 bp, Homo sapiens
ctagccgttcatatcaacct

SEQ ID NO: 4367 - DNA, 20 bp, Homo sapiens
tgttcctaggttgatatgaa

SEQ ID NO: 4368 - DNA, 20 bp, Homo sapiens
gatatgaacggctagttaac

SEQ ID NO: 4369 - DNA, 20 bp, Homo sapiens
gaagcaaagagaagtcatcc

SEQ ID NO: 4370 - DNA, 20 bp, Homo sapiens
aagcaaagagaagtcatcct

SEQ ID NO: 4371 - DNA, 20 bp, Homo sapiens
agcaaagagaagtcatcctg

SEQ ID NO: 4372 - DNA, 20 bp, Homo sapiens
gcaaagagaagtcatcctgg

SEQ ID NO: 4373 - DNA, 20 bp, Homo sapiens
ttgtcactgccatggccccc

SEQ ID NO: 4374 - DNA, 20 bp, Homo sapiens
agaagtcatcctgggggcca

SEQ ID NO: 4375 - DNA, 20 bp, Homo sapiens
agtcctacttgtcactgcca

SEQ ID NO: 4376 - DNA, 20 bp, Homo sapiens
gggccatggcagtgacaagt

SEQ ID NO: 4377 - DNA, 20 bp, Homo sapiens
ggcagtgacaagtaggactt

SEQ ID NO: 4378 - DNA, 20 bp, Homo sapiens
gcagtgacaagtaggactta

SEQ ID NO: 4379 - DNA, 20 bp, Homo sapiens
gtgacaagtaggacttaggg

SEQ ID NO: 4380 - DNA, 20 bp, Homo sapiens
tgacaagtaggacttaggga

SEQ ID NO: 4381 - DNA, 20 bp, Homo sapiens
cagcaccttaaatggtataa

SEQ ID NO: 4382 - DNA, 20 bp, Homo sapiens
ccagcaccttaaatggtata

SEQ ID NO: 4383 - DNA, 20 bp, Homo sapiens
ggaagcccttataccattta

SEQ ID NO: 4384 - DNA, 20 bp, Homo sapiens
ctctgggccagcaccttaaa

SEQ ID NO: 4385 - DNA, 20 bp, Homo sapiens
ccttataccatttaaggtgc

SEQ ID NO: 4386 - DNA, 20 bp, Homo sapiens
tttaaggtgctggcccagag

SEQ ID NO: 4387 - DNA, 20 bp, Homo sapiens
gtcactgaaggctcctctct

SEQ ID NO: 4388 - DNA, 20 bp, Homo sapiens
tgtcactgaaggctcctctc

SEQ ID NO: 4389 - DNA, 20 bp, Homo sapiens
tcttgtttgtctgtcactga

SEQ ID NO: 4390 - DNA, 20 bp, Homo sapiens
agtgacagacaaacaagagc

SEQ ID NO: 4391 - DNA, 20 bp, Homo sapiens
tggaatgcattgaattgtat

SEQ ID NO: 4392 - DNA, 20 bp, Homo sapiens
gtcatacatggttgaatgaa

SEQ ID NO: 4393 - DNA, 20 bp, Homo sapiens
cccacattggatgtcataca

SEQ ID NO: 4394 - DNA, 20 bp, Homo sapiens
accatgtatgacatccaatg

SEQ ID NO: 4395 - DNA, 20 bp, Homo sapiens
ccatgtatgacatccaatgt

SEQ ID NO: 4396 - DNA, 20 bp, Homo sapiens
catgagtctggatcccacat

SEQ ID NO: 4397 - DNA, 20 bp, Homo sapiens
agctctaatcatcatgagtc

SEQ ID NO: 4398 - DNA, 20 bp, Homo sapiens
atgagcacttactatgtacc

SEQ ID NO: 4399 - DNA, 20 bp, Homo sapiens
aaagcatgtagaatagtgcc

SEQ ID NO: 4400 - DNA, 20 bp, Homo sapiens
acctcattgggttattgtga

SEQ ID NO: 4401 - DNA, 20 bp, Homo sapiens
cacctcattgggttattgtg

SEQ ID NO: 4402 - DNA, 20 bp, Homo sapiens
accctcacaataacccaatg

SEQ ID NO: 4403 - DNA, 20 bp, Homo sapiens
ataatagtacccacctcatt

SEQ ID NO: 4404 - DNA, 20 bp, Homo sapiens
ctcacaataacccaatgagg

SEQ ID NO: 4405 - DNA, 20 bp, Homo sapiens
cataatagtacccacctcat

SEQ ID NO: 4406 - DNA, 20 bp, Homo sapiens
tcacaataacccaatgaggt

SEQ ID NO: 4407 - DNA, 20 bp, Homo sapiens
tgatcttcgtttttcatatg

SEQ ID NO: 4408 - DNA, 20 bp, Homo sapiens
gtttttcatatgaggaaact

SEQ ID NO: 4409 - DNA, 20 bp, Homo sapiens
atatgaggaaactaggcata

SEQ ID NO: 4410 - DNA, 20 bp, Homo sapiens
gatgttgagtaatttgccca

SEQ ID NO: 4411 - DNA, 20 bp, Homo sapiens
attgctagctgagcgaccgt

SEQ ID NO: 4412 - DNA, 20 bp, Homo sapiens
tattgctagctgagcgaccg

SEQ ID NO: 4413 - DNA, 20 bp, Homo sapiens
gtatttaaatttagccaccc

SEQ ID NO: 4414 - DNA, 20 bp, Homo sapiens
taaggaaactaaatccaggg

SEQ ID NO: 4415 - DNA, 20 bp, Homo sapiens
gtgtaaggaaactaaatcca

SEQ ID NO: 4416 - DNA, 20 bp, Homo sapiens
agtgtaaggaaactaaatcc

SEQ ID NO: 4417 - DNA, 20 bp, Homo sapiens
atgcataatggttaagtgta

SEQ ID NO: 4418 - DNA, 20 bp, Homo sapiens
aatggggccatgatgcataa

SEQ ID NO: 4419 - DNA, 20 bp, Homo sapiens
cacttaaccattatgcatca

SEQ ID NO: 4420 - DNA, 20 bp, Homo sapiens
ctcaagcccactgtaaaatg

SEQ ID NO: 4421 - DNA, 20 bp, Homo sapiens
actcaagcccactgtaaaat

SEQ ID NO: 4422 - DNA, 20 bp, Homo sapiens
gactcaagcccactgtaaaa

SEQ ID NO: 4423 - DNA, 20 bp, Homo sapiens
atcatggccccattttacag

SEQ ID NO: 4424 - DNA, 20 bp, Homo sapiens
tcatggccccattttacagt

SEQ ID NO: 4425 - DNA, 20 bp, Homo sapiens
tctttgtcatataacccagt

SEQ ID NO: 4426 - DNA, 20 bp, Homo sapiens
atagtggctgctaacctact

SEQ ID NO: 4427 - DNA, 20 bp, Homo sapiens
aatagtggctgctaacctac

SEQ ID NO: 4428 - DNA, 20 bp, Homo sapiens
aatctacagggttggaatag

SEQ ID NO: 4429 - DNA, 20 bp, Homo sapiens
ctagagtcaatctacagggt

SEQ ID NO: 4430 - DNA, 20 bp, Homo sapiens
gaccctagagtcaatctaca

SEQ ID NO: 4431 - DNA, 20 bp, Homo sapiens
ggaccctagagtcaatctac

SEQ ID NO: 4432 - DNA, 20 bp, Homo sapiens
caaccctgtagattgactct

SEQ ID NO: 4433 - DNA, 20 bp, Homo sapiens
aaccctgtagattgactcta

SEQ ID NO: 4434 - DNA, 20 bp, Homo sapiens
cggtgcaggggtaaagaaca

SEQ ID NO: 4435 - DNA, 20 bp, Homo sapiens
acgttagtagcacggtgcag

SEQ ID NO: 4436 - DNA, 20 bp, Homo sapiens
tacgttagtagcacggtgca

SEQ ID NO: 4437 - DNA, 20 bp, Homo sapiens
ctacgttagtagcacggtgc

SEQ ID NO: 4438 - DNA, 20 bp, Homo sapiens
ttgtacctacgttagtagca

SEQ ID NO: 4439 - DNA, 20 bp, Homo sapiens
ctgcaccgtgctactaacgt

SEQ ID NO: 4440 - DNA, 20 bp, Homo sapiens
ccgtataaagtgagtttctg

SEQ ID NO: 4441 - DNA, 20 bp, Homo sapiens
cctcagaaactcactttata

SEQ ID NO: 4442 - DNA, 20 bp, Homo sapiens
cactttatacggaagctcag

SEQ ID NO: 4443 - DNA, 20 bp, Homo sapiens
tttatacggaagctcagagg

SEQ ID NO: 4444 - DNA, 20 bp, Homo sapiens
ttatacggaagctcagagga

SEQ ID NO: 4445 - DNA, 20 bp, Homo sapiens
cagaggagggtccacaaccc

SEQ ID NO: 4446 - DNA, 20 bp, Homo sapiens
cgtctcccctgcctgggttg

SEQ ID NO: 4447 - DNA, 20 bp, Homo sapiens
ggagggtccacaacccaggc

SEQ ID NO: 4448 - DNA, 20 bp, Homo sapiens
gagggtccacaacccaggca

SEQ ID NO: 4449 - DNA, 20 bp, Homo sapiens
agggtccacaacccaggcag

SEQ ID NO: 4450 - DNA, 20 bp, Homo sapiens
caccatcgtctcccctgcct

SEQ ID NO: 4451 - DNA, 20 bp, Homo sapiens
acaccatcgtctcccctgcc

SEQ ID NO: 4452 - DNA, 20 bp, Homo sapiens
aacccaggcaggggagacga

SEQ ID NO: 4453 - DNA, 20 bp, Homo sapiens
gcaggggagacgatggtgtc

SEQ ID NO: 4454 - DNA, 20 bp, Homo sapiens
caggggagacgatggtgtca

SEQ ID NO: 4455 - DNA, 20 bp, Homo sapiens
aggggagacgatggtgtcag

SEQ ID NO: 4456 - DNA, 20 bp, Homo sapiens
ggagacgatggtgtcagggg

SEQ ID NO: 4457 - DNA, 20 bp, Homo sapiens
gagacgatggtgtcagggga

SEQ ID NO: 4458 - DNA, 20 bp, Homo sapiens
acgatggtgtcaggggaggg

SEQ ID NO: 4459 - DNA, 20 bp, Homo sapiens
agggaggtgactgcccagcc

SEQ ID NO: 4460 - DNA, 20 bp, Homo sapiens
tgagccttcaagacctggct

SEQ ID NO: 4461 - DNA, 20 bp, Homo sapiens
ctgagccttcaagacctggc

SEQ ID NO: 4462 - DNA, 20 bp, Homo sapiens
cctactgagccttcaagacc

SEQ ID NO: 4463 - DNA, 20 bp, Homo sapiens
actgcccagccaggtcttga

SEQ ID NO: 4464 - DNA, 20 bp, Homo sapiens
ccaggtcttgaaggctcagt

SEQ ID NO: 4465 - DNA, 20 bp, Homo sapiens
ggctcagtaggaattacctg

SEQ ID NO: 4466 - DNA, 20 bp, Homo sapiens
gctcagtaggaattacctgt

SEQ ID NO: 4467 - DNA, 20 bp, Homo sapiens
atgaccctcctttgtcccac

SEQ ID NO: 4468 - DNA, 20 bp, Homo sapiens
aggaattacctgtgggacaa

SEQ ID NO: 4469 - DNA, 20 bp, Homo sapiens
aattacctgtgggacaaagg

SEQ ID NO: 4470 - DNA, 20 bp, Homo sapiens
attacctgtgggacaaagga

SEQ ID NO: 4471 - DNA, 20 bp, Homo sapiens
aaaggagggtcatccaagtg

SEQ ID NO: 4472 - DNA, 20 bp, Homo sapiens
aaggagggtcatccaagtga

SEQ ID NO: 4473 - DNA, 20 bp, Homo sapiens
gcacccactgtgccctcact

SEQ ID NO: 4474 - DNA, 20 bp, Homo sapiens
tcatccaagtgagggcacag

SEQ ID NO: 4475 - DNA, 20 bp, Homo sapiens
catccaagtgagggcacagt

SEQ ID NO: 4476 - DNA, 20 bp, Homo sapiens
tgagggcacagtgggtgcca

SEQ ID NO: 4477 - DNA, 20 bp, Homo sapiens
tctattgtgtgtgcacgcca

SEQ ID NO: 4478 - DNA, 20 bp, Homo sapiens
acaatagagcagactgagcc

SEQ ID NO: 4479 - DNA, 20 bp, Homo sapiens
caatagagcagactgagcct

SEQ ID NO: 4480 - DNA, 20 bp, Homo sapiens
ggcaatgcaatgttaagccc

SEQ ID NO: 4481 - DNA, 20 bp, Homo sapiens
ggcttaacattgcattgccc

SEQ ID NO: 4482 - DNA, 20 bp, Homo sapiens
gtttccccttttaggctcca

SEQ ID NO: 4483 - DNA, 20 bp, Homo sapiens
tgtttccccttttaggctcc

SEQ ID NO: 4484 - DNA, 20 bp, Homo sapiens
gcattgccctggagcctaaa

SEQ ID NO: 4485 - DNA, 20 bp, Homo sapiens
cattgccctggagcctaaaa

SEQ ID NO: 4486 - DNA, 20 bp, Homo sapiens
attgccctggagcctaaaag

SEQ ID NO: 4487 - DNA, 20 bp, Homo sapiens
ggccctttgtttcccctttt

SEQ ID NO: 4488 - DNA, 20 bp, Homo sapiens
gagcctaaaaggggaaacaa

SEQ ID NO: 4489 - DNA, 20 bp, Homo sapiens
agcctaaaaggggaaacaaa

SEQ ID NO: 4490 - DNA, 20 bp, Homo sapiens
taaaaggggaaacaaagggc

SEQ ID NO: 4491 - DNA, 20 bp, Homo sapiens
aaaaggggaaacaaagggcc

SEQ ID NO: 4492 - DNA, 20 bp, Homo sapiens
caggcgtgagccacgtcgcc

SEQ ID NO: 4493 - DNA, 20 bp, Homo sapiens
aaacaaagggccgggcgacg

SEQ ID NO: 4494 - DNA, 20 bp, Homo sapiens
tcccaatgtgccgggattac

SEQ ID NO: 4495 - DNA, 20 bp, Homo sapiens
gtggctcacgcctgtaatcc

SEQ ID NO: 4496 - DNA, 20 bp, Homo sapiens
ccttggcctcccaatgtgcc

SEQ ID NO: 4497 - DNA, 20 bp, Homo sapiens
cgcctgtaatcccggcacat

SEQ ID NO: 4498 - DNA, 20 bp, Homo sapiens
gccttggcctcccaatgtgc

SEQ ID NO: 4499 - DNA, 20 bp, Homo sapiens
gcctgtaatcccggcacatt

SEQ ID NO: 4500 - DNA, 20 bp, Homo sapiens
tgtaatcccggcacattggg

SEQ ID NO: 4501 - DNA, 20 bp, Homo sapiens
cccggcacattgggaggcca

SEQ ID NO: 4502 - DNA, 20 bp, Homo sapiens
gcacattgggaggccaaggc

SEQ ID NO: 4503 - DNA, 20 bp, Homo sapiens
ctcaggtgattctccagcct

SEQ ID NO: 4504 - DNA, 20 bp, Homo sapiens
caaggctggagaatcacctg

SEQ ID NO: 4505 - DNA, 20 bp, Homo sapiens
ctggagaatcacctgaggtt

SEQ ID NO: 4506 - DNA, 20 bp, Homo sapiens
ggtctcgaactcctaacctc

SEQ ID NO: 4507 - DNA, 20 bp, Homo sapiens
ttaggagttcgagaccagcc

SEQ ID NO: 4508 - DNA, 20 bp, Homo sapiens
ttttgccatgttggccaggc

SEQ ID NO: 4509 - DNA, 20 bp, Homo sapiens
gcggttttgccatgttggcc

SEQ ID NO: 4510 - DNA, 20 bp, Homo sapiens
cgagaccagcctggccaaca

SEQ ID NO: 4511 - DNA, 20 bp, Homo sapiens
gagatgcggttttgccatgt

SEQ ID NO: 4512 - DNA, 20 bp, Homo sapiens
ttataattttagtagagatg

SEQ ID NO: 4513 - DNA, 20 bp, Homo sapiens
tctactaaaattataaaaac

SEQ ID NO: 4514 - DNA, 20 bp, Homo sapiens
ctaaaattataaaaactggc

SEQ ID NO: 4515 - DNA, 20 bp, Homo sapiens
taaaattataaaaactggct

SEQ ID NO: 4516 - DNA, 20 bp, Homo sapiens
ttataaaaactggctgggtg

SEQ ID NO: 4517 - DNA, 20 bp, Homo sapiens
taaaaactggctgggtgtgg

SEQ ID NO: 4518 - DNA, 20 bp, Homo sapiens
taatggcctcccaagtagct

SEQ ID NO: 4519 - DNA, 20 bp, Homo sapiens
cgtctataatccgagctact

SEQ ID NO: 4520 - DNA, 20 bp, Homo sapiens
gtctataatccgagctactt

SEQ ID NO: 4521 - DNA, 20 bp, Homo sapiens
tataatccgagctacttggg

SEQ ID NO: 4522 - DNA, 20 bp, Homo sapiens
gcgcccaggctggagtgtaa

SEQ ID NO: 4523 - DNA, 20 bp, Homo sapiens
gaggccattacactccagcc

SEQ ID NO: 4524 - DNA, 20 bp, Homo sapiens
aggccattacactccagcct

SEQ ID NO: 4525 - DNA, 20 bp, Homo sapiens
tctcactctggcgcccaggc

SEQ ID NO: 4526 - DNA, 20 bp, Homo sapiens
gaagtctcactctggcgccc

SEQ ID NO: 4527 - DNA, 20 bp, Homo sapiens
tttgagatgaagtctcactc

SEQ ID NO: 4528 - DNA, 20 bp, Homo sapiens
ttgttgttgtttttgttgtt

SEQ ID NO: 4529 - DNA, 20 bp, Homo sapiens
agaacaacaaaaaaacaaag

SEQ ID NO: 4530 - DNA, 20 bp, Homo sapiens
aaaaaaacaaagaggagagc

SEQ ID NO: 4531 - DNA, 20 bp, Homo sapiens
aaaaaacaaagaggagagca

SEQ ID NO: 4532 - DNA, 20 bp, Homo sapiens
acaaagaggagagcagggac

SEQ ID NO: 4533 - DNA, 20 bp, Homo sapiens
caaagaggagagcagggact

SEQ ID NO: 4534 - DNA, 20 bp, Homo sapiens
aggagagcagggactgggtg

SEQ ID NO: 4535 - DNA, 20 bp, Homo sapiens
cccaaagtgtttgggattac

SEQ ID NO: 4536 - DNA, 20 bp, Homo sapiens
cttggtctcccaaagtgttt

SEQ ID NO: 4537 - DNA, 20 bp, Homo sapiens
ccttggtctcccaaagtgtt

SEQ ID NO: 4538 - DNA, 20 bp, Homo sapiens
gcctgtaatcccaaacactt

SEQ ID NO: 4539 - DNA, 20 bp, Homo sapiens
cctgtaatcccaaacacttt

SEQ ID NO: 4540 - DNA, 20 bp, Homo sapiens
ccaaacactttgggagacca

SEQ ID NO: 4541 - DNA, 20 bp, Homo sapiens
acactttgggagaccaaggc

SEQ ID NO: 4542 - DNA, 20 bp, Homo sapiens
ctcaggtgatctgcctgcct

SEQ ID NO: 4543 - DNA, 20 bp, Homo sapiens
caaggcaggcagatcacctg

SEQ ID NO: 4544 - DNA, 20 bp, Homo sapiens
caggcagatcacctgaggtc

SEQ ID NO: 4545 - DNA, 20 bp, Homo sapiens
ggtctcgaactcctgacctc

SEQ ID NO: 4546 - DNA, 20 bp, Homo sapiens
tcaggagttcgagaccagcc

SEQ ID NO: 4547 - DNA, 20 bp, Homo sapiens
ttttaccatgttggccaggc

SEQ ID NO: 4548 - DNA, 20 bp, Homo sapiens
agggttttaccatgttggcc

SEQ ID NO: 4549 - DNA, 20 bp, Homo sapiens
cgagaccagcctggccaaca

SEQ ID NO: 4550 - DNA, 20 bp, Homo sapiens
gagacagggttttaccatgt

SEQ ID NO: 4551 - DNA, 20 bp, Homo sapiens
ttgtatttttagtagagaca

SEQ ID NO: 4552 - DNA, 20 bp, Homo sapiens
tttgtatttttagtagagac

SEQ ID NO: 4553 - DNA, 20 bp, Homo sapiens
ctaaaaatacaaaaattagc

SEQ ID NO: 4554 - DNA, 20 bp, Homo sapiens
atacaaaaattagccggatg

SEQ ID NO: 4555 - DNA, 20 bp, Homo sapiens
caggcacgtgccaccacatc

SEQ ID NO: 4556 - DNA, 20 bp, Homo sapiens
caaaaattagccggatgtgg

SEQ ID NO: 4557 - DNA, 20 bp, Homo sapiens
tcccaagcagctgggactac

SEQ ID NO: 4558 - DNA, 20 bp, Homo sapiens
cctcagcttcccaagcagct

SEQ ID NO: 4559 - DNA, 20 bp, Homo sapiens
tgcctgtagtcccagctgct

SEQ ID NO: 4560 - DNA, 20 bp, Homo sapiens
ccctcagcttcccaagcagc

SEQ ID NO: 4561 - DNA, 20 bp, Homo sapiens
gcctgtagtcccagctgctt

SEQ ID NO: 4562 - DNA, 20 bp, Homo sapiens
cccagctgcttgggaagctg

SEQ ID NO: 4563 - DNA, 20 bp, Homo sapiens
ccagctgcttgggaagctga

SEQ ID NO: 4564 - DNA, 20 bp, Homo sapiens
gctgcttgggaagctgaggg

SEQ ID NO: 4565 - DNA, 20 bp, Homo sapiens
gaggagaattgcttgaaccc

SEQ ID NO: 4566 - DNA, 20 bp, Homo sapiens
gagaattgcttgaacccagg

SEQ ID NO: 4567 - DNA, 20 bp, Homo sapiens
ctcagcaacctctgcctcct

SEQ ID NO: 4568 - DNA, 20 bp, Homo sapiens
gctcagcaacctctgcctcc

SEQ ID NO: 4569 - DNA, 20 bp, Homo sapiens
tgcttgaacccaggaggcag

SEQ ID NO: 4570 - DNA, 20 bp, Homo sapiens
tcacccagggtggagtgcag

SEQ ID NO: 4571 - DNA, 20 bp, Homo sapiens
catgccactgcactccaccc

SEQ ID NO: 4572 - DNA, 20 bp, Homo sapiens
atgccactgcactccaccct

SEQ ID NO: 4573 - DNA, 20 bp, Homo sapiens
tcccactctgtcacccaggg

SEQ ID NO: 4574 - DNA, 20 bp, Homo sapiens
gagtcccactctgtcaccca

SEQ ID NO: 4575 - DNA, 20 bp, Homo sapiens
agagtcccactctgtcaccc

SEQ ID NO: 4576 - DNA, 20 bp, Homo sapiens
ctccaccctgggtgacagag

SEQ ID NO: 4577 - DNA, 20 bp, Homo sapiens
tccaccctgggtgacagagt

SEQ ID NO: 4578 - DNA, 20 bp, Homo sapiens
agtaataaataaaaataaag

SEQ ID NO: 4579 - DNA, 20 bp, Homo sapiens
gtaataaataaaaataaaga

SEQ ID NO: 4580 - DNA, 20 bp, Homo sapiens
aaaaataaagagggaagcag

SEQ ID NO: 4581 - DNA, 20 bp, Homo sapiens
aaaataaagagggaagcagc

SEQ ID NO: 4582 - DNA, 20 bp, Homo sapiens
ataaagagggaagcagcggg

SEQ ID NO: 4583 - DNA, 20 bp, Homo sapiens
gcagcgggtggcagactcac

SEQ ID NO: 4584 - DNA, 20 bp, Homo sapiens
cagcgggtggcagactcact

SEQ ID NO: 4585 - DNA, 20 bp, Homo sapiens
actgggctgcatacgaagtt

SEQ ID NO: 4586 - DNA, 20 bp, Homo sapiens
cgaagtttggcttcagtctg

SEQ ID NO: 4587 - DNA, 20 bp, Homo sapiens
tctcgctgctgtttactatt

SEQ ID NO: 4588 - DNA, 20 bp, Homo sapiens
aaacagcagcgagacaagtt

SEQ ID NO: 4589 - DNA, 20 bp, Homo sapiens
aacagcagcgagacaagttt

SEQ ID NO: 4590 - DNA, 20 bp, Homo sapiens
cagcgagacaagtttgggtt

SEQ ID NO: 4591 - DNA, 20 bp, Homo sapiens
agcgagacaagtttgggttt

SEQ ID NO: 4592 - DNA, 20 bp, Homo sapiens
acaagtttgggtttgggtca

SEQ ID NO: 4593 - DNA, 20 bp, Homo sapiens
agtttgggtttgggtcatgg

SEQ ID NO: 4594 - DNA, 20 bp, Homo sapiens
gtcatggaggaagccatgcc

SEQ ID NO: 4595 - DNA, 20 bp, Homo sapiens
tcatggaggaagccatgcca

SEQ ID NO: 4596 - DNA, 20 bp, Homo sapiens
gcccaacaccagccctggca

SEQ ID NO: 4597 - DNA, 20 bp, Homo sapiens
ggaggaagccatgccagggc

SEQ ID NO: 4598 - DNA, 20 bp, Homo sapiens
cctgtgcccaacaccagccc

SEQ ID NO: 4599 - DNA, 20 bp, Homo sapiens
agccatgccagggctggtgt

SEQ ID NO: 4600 - DNA, 20 bp, Homo sapiens
gccatgccagggctggtgtt

SEQ ID NO: 4601 - DNA, 20 bp, Homo sapiens
ccagggctggtgttgggcac

SEQ ID NO: 4602 - DNA, 20 bp, Homo sapiens
cagggctggtgttgggcaca

SEQ ID NO: 4603 - DNA, 20 bp, Homo sapiens
ctggtgttgggcacagggaa

SEQ ID NO: 4604 - DNA, 20 bp, Homo sapiens
tggtgttgggcacagggaaa

SEQ ID NO: 4605 - DNA, 20 bp, Homo sapiens
ggtgttgggcacagggaaag

SEQ ID NO: 4606 - DNA, 20 bp, Homo sapiens
tgggcacagggaaaggggca

SEQ ID NO: 4607 - DNA, 20 bp, Homo sapiens
ctacagcctccacgctggtc

SEQ ID NO: 4608 - DNA, 20 bp, Homo sapiens
cttgagacaccagaccagcg

SEQ ID NO: 4609 - DNA, 20 bp, Homo sapiens
gagacaccagaccagcgtgg

SEQ ID NO: 4610 - DNA, 20 bp, Homo sapiens
ctacactacagcctccacgc

SEQ ID NO: 4611 - DNA, 20 bp, Homo sapiens
tgtagtgtagtattgacctg

SEQ ID NO: 4612 - DNA, 20 bp, Homo sapiens
atcagaatgttgaagtcctc

SEQ ID NO: 4613 - DNA, 20 bp, Homo sapiens
tgaggacttcaacattctga

SEQ ID NO: 4614 - DNA, 20 bp, Homo sapiens
gattttttgagcatgtacca

SEQ ID NO: 4615 - DNA, 20 bp, Homo sapiens
taaagtgtaatatataacca

SEQ ID NO: 4616 - DNA, 20 bp, Homo sapiens
acaataaatacatacaaatt

SEQ ID NO: 4617 - DNA, 20 bp, Homo sapiens
tttcaaattactaatcataa

SEQ ID NO: 4618 - DNA, 20 bp, Homo sapiens
tcataatggtgtcaatctcc

SEQ ID NO: 4619 - DNA, 20 bp, Homo sapiens
aatggtgtcaatctccaggc

SEQ ID NO: 4620 - DNA, 20 bp, Homo sapiens
atggtgtcaatctccaggca

SEQ ID NO: 4621 - DNA, 20 bp, Homo sapiens
ctgtagcaatggaccctgcc

SEQ ID NO: 4622 - DNA, 20 bp, Homo sapiens
actatcgtcaactgtagcaa

SEQ ID NO: 4623 - DNA, 20 bp, Homo sapiens
attgctacagttgacgatag

SEQ ID NO: 4624 - DNA, 20 bp, Homo sapiens
aaattatcaagaagactctg

SEQ ID NO: 4625 - DNA, 20 bp, Homo sapiens
tgtgactgacagcttgtacg

SEQ ID NO: 4626 - DNA, 20 bp, Homo sapiens
tcaagtgaacaaaagggaaa

SEQ ID NO: 4627 - DNA, 20 bp, Homo sapiens
tggcagtcaagtgaacaaaa

SEQ ID NO: 4628 - DNA, 20 bp, Homo sapiens
atggcagtcaagtgaacaaa

SEQ ID NO: 4629 - DNA, 20 bp, Homo sapiens
gattggaagcatagaaataa

SEQ ID NO: 4630 - DNA, 20 bp, Homo sapiens
tcgtgcagaaaaacacagat

SEQ ID NO: 4631 - DNA, 20 bp, Homo sapiens
ctgtgtttttctgcacgagt

SEQ ID NO: 4632 - DNA, 20 bp, Homo sapiens
actttcacaaaatgaagtaa

SEQ ID NO: 4633 - DNA, 20 bp, Homo sapiens
aagtttgttgagttaaactt

SEQ ID NO: 4634 - DNA, 20 bp, Homo sapiens
caggactgaattcaattaag

SEQ ID NO: 4635 - DNA, 20 bp, Homo sapiens
cacttaattgaattcagtcc

SEQ ID NO: 4636 - DNA, 20 bp, Homo sapiens
ataatctattatagtttacc

SEQ ID NO: 4637 - DNA, 20 bp, Homo sapiens
aatgtctttttagaattggc

SEQ ID NO: 4638 - DNA, 20 bp, Homo sapiens
tcaaaatgtctttttagaat

SEQ ID NO: 4639 - DNA, 20 bp, Homo sapiens
aaagacattttgagacaatc

SEQ ID NO: 4640 - DNA, 20 bp, Homo sapiens
tgaatatcttacgatataca

SEQ ID NO: 4641 - DNA, 20 bp, Homo sapiens
ggattattgttaattttgtt

SEQ ID NO: 4642 - DNA, 20 bp, Homo sapiens
tgttaggtatgataaaagca

SEQ ID NO: 4643 - DNA, 20 bp, Homo sapiens
taggtatgataaaagcatgg

SEQ ID NO: 4644 - DNA, 20 bp, Homo sapiens
aggtatgataaaagcatggt

SEQ ID NO: 4645 - DNA, 20 bp, Homo sapiens
caatgtgcctctctaacaga

SEQ ID NO: 4646 - DNA, 20 bp, Homo sapiens
taagtctccatctgttagag

SEQ ID NO: 4647 - DNA, 20 bp, Homo sapiens
gttagagaggcacattgaaa

SEQ ID NO: 4648 - DNA, 20 bp, Homo sapiens
cattgaaatggcatgatatc

SEQ ID NO: 4649 - DNA, 20 bp, Homo sapiens
attgaaatggcatgatatct

SEQ ID NO: 4650 - DNA, 20 bp, Homo sapiens
ttgaaatggcatgatatctg

SEQ ID NO: 4651 - DNA, 20 bp, Homo sapiens
tctgtactttttcttttttc

SEQ ID NO: 4652 - DNA, 20 bp, Homo sapiens
gaaaaaagaaaaagtacaga

SEQ ID NO: 4653 - DNA, 20 bp, Homo sapiens
aaggattatagaaacaagat

SEQ ID NO: 4654 - DNA, 20 bp, Homo sapiens
atgtgacaatcatcagagtt

SEQ ID NO: 4655 - DNA, 20 bp, Homo sapiens
caatcatcagagtttggaga

SEQ ID NO: 4656 - DNA, 20 bp, Homo sapiens
aatcatcagagtttggagat

SEQ ID NO: 4657 - DNA, 20 bp, Homo sapiens
gagtttggagatgggcacgt

SEQ ID NO: 4658 - DNA, 20 bp, Homo sapiens
agtttggagatgggcacgta

SEQ ID NO: 4659 - DNA, 20 bp, Homo sapiens
aaaaaaaaaaaaaaacaccc

SEQ ID NO: 4660 - DNA, 20 bp, Homo sapiens
cctccctaaatgctcagcca

SEQ ID NO: 4661 - DNA, 20 bp, Homo sapiens
gcctccctaaatgctcagcc

SEQ ID NO: 4662 - DNA, 20 bp, Homo sapiens
aacaccctggctgagcattt

SEQ ID NO: 4663 - DNA, 20 bp, Homo sapiens
acaccctggctgagcattta

SEQ ID NO: 4664 - DNA, 20 bp, Homo sapiens
ccctggctgagcatttaggg

SEQ ID NO: 4665 - DNA, 20 bp, Homo sapiens
gagcatttagggaggccaag

SEQ ID NO: 4666 - DNA, 20 bp, Homo sapiens
agcatttagggaggccaagt

SEQ ID NO: 4667 - DNA, 20 bp, Homo sapiens
gcatttagggaggccaagtg

SEQ ID NO: 4668 - DNA, 20 bp, Homo sapiens
tttaagcgatcctccccact

SEQ ID NO: 4669 - DNA, 20 bp, Homo sapiens
tttagggaggccaagtgggg

SEQ ID NO: 4670 - DNA, 20 bp, Homo sapiens
ggggaggatcgcttaaacca

SEQ ID NO: 4671 - DNA, 20 bp, Homo sapiens
taggctcgtcttgaactcct

SEQ ID NO: 4672 - DNA, 20 bp, Homo sapiens
aaggagttcaagacgagcct

SEQ ID NO: 4673 - DNA, 20 bp, Homo sapiens
ggggtctccctatgtttcct

SEQ ID NO: 4674 - DNA, 20 bp, Homo sapiens
aagacgagcctaggaaacat

SEQ ID NO: 4675 - DNA, 20 bp, Homo sapiens
agacgagcctaggaaacata

SEQ ID NO: 4676 - DNA, 20 bp, Homo sapiens
ttttttttagagatgggggg

SEQ ID NO: 4677 - DNA, 20 bp, Homo sapiens
tttttttttagagatggggg

SEQ ID NO: 4678 - DNA, 20 bp, Homo sapiens
ttttttttttagagatgggg

SEQ ID NO: 4679 - DNA, 20 bp, Homo sapiens
tttttttttttagagatggg

SEQ ID NO: 4680 - DNA, 20 bp, Homo sapiens
ttttttttttttagagatgg

SEQ ID NO: 4681 - DNA, 20 bp, Homo sapiens
tttttttttttttagagatg

SEQ ID NO: 4682 - DNA, 20 bp, Homo sapiens
ttttttttttttttagagat

SEQ ID NO: 4683 - DNA, 20 bp, Homo sapiens
tttttttttttttttagaga

SEQ ID NO: 4684 - DNA, 20 bp, Homo sapiens
ctttaaaatttaacccagtg

SEQ ID NO: 4685 - DNA, 20 bp, Homo sapiens
taggcatgtgccaccacact

SEQ ID NO: 4686 - DNA, 20 bp, Homo sapiens
taaaatttaacccagtgtgg

SEQ ID NO: 4687 - DNA, 20 bp, Homo sapiens
ataggcatgtgccaccacac

SEQ ID NO: 4688 - DNA, 20 bp, Homo sapiens
tactgagtagctgggactat

SEQ ID NO: 4689 - DNA, 20 bp, Homo sapiens
cctcagcctactgagtagct

SEQ ID NO: 4690 - DNA, 20 bp, Homo sapiens
acctcagcctactgagtagc

SEQ ID NO: 4691 - DNA, 20 bp, Homo sapiens
tatagtcccagctactcagt

SEQ ID NO: 4692 - DNA, 20 bp, Homo sapiens
cccagctactcagtaggctg

SEQ ID NO: 4693 - DNA, 20 bp, Homo sapiens
actcagtaggctgaggtgag

SEQ ID NO: 4694 - DNA, 20 bp, Homo sapiens
gtgagaggcttgcttgagcc

SEQ ID NO: 4695 - DNA, 20 bp, Homo sapiens
tgagaggcttgcttgagcct

SEQ ID NO: 4696 - DNA, 20 bp, Homo sapiens
cactgcagcctcaagctccc

SEQ ID NO: 4697 - DNA, 20 bp, Homo sapiens
tgcttgagcctgggagcttg

SEQ ID NO: 4698 - DNA, 20 bp, Homo sapiens
ctgggagcttgaggctgcag

SEQ ID NO: 4699 - DNA, 20 bp, Homo sapiens
tgggagcttgaggctgcagt

SEQ ID NO: 4700 - DNA, 20 bp, Homo sapiens
agcttgaggctgcagtggga

SEQ ID NO: 4701 - DNA, 20 bp, Homo sapiens
gcttgaggctgcagtgggac

SEQ ID NO: 4702 - DNA, 20 bp, Homo sapiens
tcgcccatgctggagtgaag

SEQ ID NO: 4703 - DNA, 20 bp, Homo sapiens
tgtaccacttcactccagca

SEQ ID NO: 4704 - DNA, 20 bp, Homo sapiens
gtaccacttcactccagcat

SEQ ID NO: 4705 - DNA, 20 bp, Homo sapiens
tcttgctctgtcgcccatgc

SEQ ID NO: 4706 - DNA, 20 bp, Homo sapiens
tttttattttttttgagaca

SEQ ID NO: 4707 - DNA, 20 bp, Homo sapiens
atttttattttttttgagac

SEQ ID NO: 4708 - DNA, 20 bp, Homo sapiens
aaaaaaaataaaaatatttg

SEQ ID NO: 4709 - DNA, 20 bp, Homo sapiens
aaaatatttgaggtgaagcg

SEQ ID NO: 4710 - DNA, 20 bp, Homo sapiens
aaaatataaataaaacataa

SEQ ID NO: 4711 - DNA, 20 bp, Homo sapiens
tataaataaaacataaaggc

SEQ ID NO: 4712 - DNA, 20 bp, Homo sapiens
ataaataaaacataaaggct

SEQ ID NO: 4713 - DNA, 20 bp, Homo sapiens
aacataaaggctgggtgtag

SEQ ID NO: 4714 - DNA, 20 bp, Homo sapiens
tcccaaagtgctgggattac

SEQ ID NO: 4715 - DNA, 20 bp, Homo sapiens
ctttggcctcccaaagtgct

SEQ ID NO: 4716 - DNA, 20 bp, Homo sapiens
cgcctgtaatcccagcactt

SEQ ID NO: 4717 - DNA, 20 bp, Homo sapiens
gctttggcctcccaaagtgc

SEQ ID NO: 4718 - DNA, 20 bp, Homo sapiens
gcctgtaatcccagcacttt

SEQ ID NO: 4719 - DNA, 20 bp, Homo sapiens
tgtaatcccagcactttggg

SEQ ID NO: 4720 - DNA, 20 bp, Homo sapiens
gcactttgggaggccaaagc

SEQ ID NO: 4721 - DNA, 20 bp, Homo sapiens
acctcgtgatctgcctgctt

SEQ ID NO: 4722 - DNA, 20 bp, Homo sapiens
gccaaagcaggcagatcacg

SEQ ID NO: 4723 - DNA, 20 bp, Homo sapiens
agcaggcagatcacgaggtc

SEQ ID NO: 4724 - DNA, 20 bp, Homo sapiens
cagatcacgaggtctggaga

SEQ ID NO: 4725 - DNA, 20 bp, Homo sapiens
tctggagatggagaccatcc

SEQ ID NO: 4726 - DNA, 20 bp, Homo sapiens
tttcatcgtgttagccagga

SEQ ID NO: 4727 - DNA, 20 bp, Homo sapiens
ggggtttcatcgtgttagcc

SEQ ID NO: 4728 - DNA, 20 bp, Homo sapiens
ttgtatttttggtagagatg

SEQ ID NO: 4729 - DNA, 20 bp, Homo sapiens
tttgtatttttggtagagat

SEQ ID NO: 4730 - DNA, 20 bp, Homo sapiens
ttttgtatttttggtagaga

SEQ ID NO: 4731 - DNA, 20 bp, Homo sapiens
ggctaatttttttgtatttt

SEQ ID NO: 4732 - DNA, 20 bp, Homo sapiens
aaaaatacaaaaaaattagc

SEQ ID NO: 4733 - DNA, 20 bp, Homo sapiens
aaaatacaaaaaaattagcc

SEQ ID NO: 4734 - DNA, 20 bp, Homo sapiens
acaaaaaaattagccgggtg

SEQ ID NO: 4735 - DNA, 20 bp, Homo sapiens
caggcacccgccaccacacc

SEQ ID NO: 4736 - DNA, 20 bp, Homo sapiens
aaaaaattagccgggtgtgg

SEQ ID NO: 4737 - DNA, 20 bp, Homo sapiens
aaattagccgggtgtggtgg

SEQ ID NO: 4738 - DNA, 20 bp, Homo sapiens
aattagccgggtgtggtggc

SEQ ID NO: 4739 - DNA, 20 bp, Homo sapiens
tcccaagtagctgggactac

SEQ ID NO: 4740 - DNA, 20 bp, Homo sapiens
cctcagcctcccaagtagct

SEQ ID NO: 4741 - DNA, 20 bp, Homo sapiens
tgcctgtagtcccagctact

SEQ ID NO: 4742 - DNA, 20 bp, Homo sapiens
gcctcagcctcccaagtagc

SEQ ID NO: 4743 - DNA, 20 bp, Homo sapiens
gcctgtagtcccagctactt

SEQ ID NO: 4744 - DNA, 20 bp, Homo sapiens
tgtagtcccagctacttggg

SEQ ID NO: 4745 - DNA, 20 bp, Homo sapiens
cccagctacttgggaggctg

SEQ ID NO: 4746 - DNA, 20 bp, Homo sapiens
gctacttgggaggctgaggc

SEQ ID NO: 4747 - DNA, 20 bp, Homo sapiens
gggaggctgaggcaggagaa

SEQ ID NO: 4748 - DNA, 20 bp, Homo sapiens
caggagaatggcgtgaaccc

SEQ ID NO: 4749 - DNA, 20 bp, Homo sapiens
gagaatggcgtgaacccagg

SEQ ID NO: 4750 - DNA, 20 bp, Homo sapiens
aatggcgtgaacccaggagg

SEQ ID NO: 4751 - DNA, 20 bp, Homo sapiens
cactgaaagctccgcctcct

SEQ ID NO: 4752 - DNA, 20 bp, Homo sapiens
tcactgaaagctccgcctcc

SEQ ID NO: 4753 - DNA, 20 bp, Homo sapiens
ttgcccaggctggagtgcag

SEQ ID NO: 4754 - DNA, 20 bp, Homo sapiens
tacgccactgcactccagcc

SEQ ID NO: 4755 - DNA, 20 bp, Homo sapiens
acgccactgcactccagcct

SEQ ID NO: 4756 - DNA, 20 bp, Homo sapiens
tctcgctctgttgcccaggc

SEQ ID NO: 4757 - DNA, 20 bp, Homo sapiens
ggagtctcgctctgttgccc

SEQ ID NO: 4758 - DNA, 20 bp, Homo sapiens
tattttcatttttttttaga

SEQ ID NO: 4759 - DNA, 20 bp, Homo sapiens
tcatattgcaactaatggca

SEQ ID NO: 4760 - DNA, 20 bp, Homo sapiens
ttcatattgcaactaatggc

SEQ ID NO: 4761 - DNA, 20 bp, Homo sapiens
attcttcatattgcaactaa

SEQ ID NO: 4762 - DNA, 20 bp, Homo sapiens
gcatatcaaatccttctcat

SEQ ID NO: 4763 - DNA, 20 bp, Homo sapiens
ggaatattggtccaatgaga

SEQ ID NO: 4764 - DNA, 20 bp, Homo sapiens
aaggtgccctaagggaatat

SEQ ID NO: 4765 - DNA, 20 bp, Homo sapiens
cattggaccaatattccctt

SEQ ID NO: 4766 - DNA, 20 bp, Homo sapiens
attggaccaatattccctta

SEQ ID NO: 4767 - DNA, 20 bp, Homo sapiens
agctttggaaggtgccctaa

SEQ ID NO: 4768 - DNA, 20 bp, Homo sapiens
tagctttggaaggtgcccta

SEQ ID NO: 4769 - DNA, 20 bp, Homo sapiens
ttgagtctcctagctttgga

SEQ ID NO: 4770 - DNA, 20 bp, Homo sapiens
ttagggcaccttccaaagct

SEQ ID NO: 4771 - DNA, 20 bp, Homo sapiens
agccttgagtctcctagctt

SEQ ID NO: 4772 - DNA, 20 bp, Homo sapiens
ttccaaagctaggagactca

SEQ ID NO: 4773 - DNA, 20 bp, Homo sapiens
aagccacccctcacttgctc

SEQ ID NO: 4774 - DNA, 20 bp, Homo sapiens
tatgacatcctgagcaagtg

SEQ ID NO: 4775 - DNA, 20 bp, Homo sapiens
atgacatcctgagcaagtga

SEQ ID NO: 4776 - DNA, 20 bp, Homo sapiens
tgacatcctgagcaagtgag

SEQ ID NO: 4777 - DNA, 20 bp, Homo sapiens
catcctgagcaagtgagggg

SEQ ID NO: 4778 - DNA, 20 bp, Homo sapiens
agcaagtgaggggtggcttc

SEQ ID NO: 4779 - DNA, 20 bp, Homo sapiens
gcaagtgaggggtggcttct

SEQ ID NO: 4780 - DNA, 20 bp, Homo sapiens
ctaggctattctatctctaa

SEQ ID NO: 4781 - DNA, 20 bp, Homo sapiens
actttgagaaacatggatct

SEQ ID NO: 4782 - DNA, 20 bp, Homo sapiens
ggaccacactttgagaaaca

SEQ ID NO: 4783 - DNA, 20 bp, Homo sapiens
gatccatgtttctcaaagtg

SEQ ID NO: 4784 - DNA, 20 bp, Homo sapiens
atgctgaggcagcaggtctg

SEQ ID NO: 4785 - DNA, 20 bp, Homo sapiens
gatgctgaggcagcaggtct

SEQ ID NO: 4786 - DNA, 20 bp, Homo sapiens
agatgctgaggcagcaggtc

SEQ ID NO: 4787 - DNA, 20 bp, Homo sapiens
ccaggagatgctgaggcagc

SEQ ID NO: 4788 - DNA, 20 bp, Homo sapiens
taaatttccaggagatgctg

SEQ ID NO: 4789 - DNA, 20 bp, Homo sapiens
cctgctgcctcagcatctcc

SEQ ID NO: 4790 - DNA, 20 bp, Homo sapiens
tgcatttctactaaatttcc

SEQ ID NO: 4791 - DNA, 20 bp, Homo sapiens
tgatcagtaggtctggccta

SEQ ID NO: 4792 - DNA, 20 bp, Homo sapiens
ctgatcagtaggtctggcct

SEQ ID NO: 4793 - DNA, 20 bp, Homo sapiens
gagcttctgatcagtaggtc

SEQ ID NO: 4794 - DNA, 20 bp, Homo sapiens
gcccagagcttctgatcagt

SEQ ID NO: 4795 - DNA, 20 bp, Homo sapiens
gacctactgatcagaagctc

SEQ ID NO: 4796 - DNA, 20 bp, Homo sapiens
acctactgatcagaagctct

SEQ ID NO: 4797 - DNA, 20 bp, Homo sapiens
ctgatcagaagctctgggcc

SEQ ID NO: 4798 - DNA, 20 bp, Homo sapiens
tgatcagaagctctgggcct

SEQ ID NO: 4799 - DNA, 20 bp, Homo sapiens
gatcagaagctctgggcctg

SEQ ID NO: 4800 - DNA, 20 bp, Homo sapiens
aacacagactgctgggcccc

SEQ ID NO: 4801 - DNA, 20 bp, Homo sapiens
ttgtgaaaacacagactgct

SEQ ID NO: 4802 - DNA, 20 bp, Homo sapiens
cttgtgaaaacacagactgc

SEQ ID NO: 4803 - DNA, 20 bp, Homo sapiens
tgtgttttcacaagccctct

SEQ ID NO: 4804 - DNA, 20 bp, Homo sapiens
gcacagaagaatcaccaaga

SEQ ID NO: 4805 - DNA, 20 bp, Homo sapiens
tgcacagaagaatcaccaag

SEQ ID NO: 4806 - DNA, 20 bp, Homo sapiens
catgaaagttcgagaattcc

SEQ ID NO: 4807 - DNA, 20 bp, Homo sapiens
atttgaatcagtctagctcc

SEQ ID NO: 4808 - DNA, 20 bp, Homo sapiens
ccaaggtctctaagatacag

SEQ ID NO: 4809 - DNA, 20 bp, Homo sapiens
cctctgtatcttagagacct

SEQ ID NO: 4810 - DNA, 20 bp, Homo sapiens
ctctgtatcttagagacctt

SEQ ID NO: 4811 - DNA, 20 bp, Homo sapiens
gaggttgactaatctgccca

SEQ ID NO: 4812 - DNA, 20 bp, Homo sapiens
gtagaaacagaggcagaaag

SEQ ID NO: 4813 - DNA, 20 bp, Homo sapiens
tctgacagaagtagaaacag

SEQ ID NO: 4814 - DNA, 20 bp, Homo sapiens
tctgtttctacttctgtcag

SEQ ID NO: 4815 - DNA, 20 bp, Homo sapiens
tgtttcattaagttgttgaa

SEQ ID NO: 4816 - DNA, 20 bp, Homo sapiens
gagttttgctcttattgccc

SEQ ID NO: 4817 - DNA, 20 bp, Homo sapiens
agttttgctcttattgccca

SEQ ID NO: 4818 - DNA, 20 bp, Homo sapiens
gttttgctcttattgcccag

SEQ ID NO: 4819 - DNA, 20 bp, Homo sapiens
tcgcaccactgcactcccct

SEQ ID NO: 4820 - DNA, 20 bp, Homo sapiens
atcgcaccactgcactcccc

SEQ ID NO: 4821 - DNA, 20 bp, Homo sapiens
tattgcccaggggagtgcag

SEQ ID NO: 4822 - DNA, 20 bp, Homo sapiens
ggagtgcagtggtgcgatct

SEQ ID NO: 4823 - DNA, 20 bp, Homo sapiens
aacctgggaggtggaggttg

SEQ ID NO: 4824 - DNA, 20 bp, Homo sapiens
tacttgaacctgggaggtgg

SEQ ID NO: 4825 - DNA, 20 bp, Homo sapiens
caccgcaacctccacctccc

SEQ ID NO: 4826 - DNA, 20 bp, Homo sapiens
aattacttgaacctgggagg

SEQ ID NO: 4827 - DNA, 20 bp, Homo sapiens
gagaattacttgaacctggg

SEQ ID NO: 4828 - DNA, 20 bp, Homo sapiens
caggagaattacttgaacct

SEQ ID NO: 4829 - DNA, 20 bp, Homo sapiens
gcaggagaattacttgaacc

SEQ ID NO: 4830 - DNA, 20 bp, Homo sapiens
gctactcgggaggctgaggc

SEQ ID NO: 4831 - DNA, 20 bp, Homo sapiens
cccagctactcgggaggctg

SEQ ID NO: 4832 - DNA, 20 bp, Homo sapiens
tgtaatcccagctactcggg

SEQ ID NO: 4833 - DNA, 20 bp, Homo sapiens
gcctgtaatcccagctactc

SEQ ID NO: 4834 - DNA, 20 bp, Homo sapiens
gcctcagcctcccgagtagc

SEQ ID NO: 4835 - DNA, 20 bp, Homo sapiens
tgcctgtaatcccagctact

SEQ ID NO: 4836 - DNA, 20 bp, Homo sapiens
cctcagcctcccgagtagct

SEQ ID NO: 4837 - DNA, 20 bp, Homo sapiens
tcccgagtagctgggattac

SEQ ID NO: 4838 - DNA, 20 bp, Homo sapiens
acaaaattagccgggcgtgg

SEQ ID NO: 4839 - DNA, 20 bp, Homo sapiens
caggcatgcgccaccacgcc

SEQ ID NO: 4840 - DNA, 20 bp, Homo sapiens
aatacaaaattagccgggcg

SEQ ID NO: 4841 - DNA, 20 bp, Homo sapiens
ctaaaaatacaaaattagcc

SEQ ID NO: 4842 - DNA, 20 bp, Homo sapiens
actaaaaatacaaaattagc

SEQ ID NO: 4843 - DNA, 20 bp, Homo sapiens
ttttgtatttttagtagaga

SEQ ID NO: 4844 - DNA, 20 bp, Homo sapiens
tttgtatttttagtagagat

SEQ ID NO: 4845 - DNA, 20 bp, Homo sapiens
ttgtatttttagtagagatg

SEQ ID NO: 4846 - DNA, 20 bp, Homo sapiens
gagatggggtttctccatgt

SEQ ID NO: 4847 - DNA, 20 bp, Homo sapiens
cgagaccagcctcaccaaca

SEQ ID NO: 4848 - DNA, 20 bp, Homo sapiens
ggggtttctccatgttggtg

SEQ ID NO: 4849 - DNA, 20 bp, Homo sapiens
tttctccatgttggtgaggc

SEQ ID NO: 4850 - DNA, 20 bp, Homo sapiens
ggtctcgaactcccaacctc

SEQ ID NO: 4851 - DNA, 20 bp, Homo sapiens
cgggtgcatcacctgaggtt

SEQ ID NO: 4852 - DNA, 20 bp, Homo sapiens
gcgggtgcatcacctgaggt

SEQ ID NO: 4853 - DNA, 20 bp, Homo sapiens
caaggcgggtgcatcacctg

SEQ ID NO: 4854 - DNA, 20 bp, Homo sapiens
ctcaggtgatgcacccgcct

SEQ ID NO: 4855 - DNA, 20 bp, Homo sapiens
gcactttgggaggccaaggc

SEQ ID NO: 4856 - DNA, 20 bp, Homo sapiens
agcactttgggaggccaagg

SEQ ID NO: 4857 - DNA, 20 bp, Homo sapiens
cccagcactttgggaggcca

SEQ ID NO: 4858 - DNA, 20 bp, Homo sapiens
tgtaatcccagcactttggg

SEQ ID NO: 4859 - DNA, 20 bp, Homo sapiens
gcctgtaatcccagcacttt

SEQ ID NO: 4860 - DNA, 20 bp, Homo sapiens
gccttggcctcccaaagtgc

SEQ ID NO: 4861 - DNA, 20 bp, Homo sapiens
cgcctgtaatcccagcactt

SEQ ID NO: 4862 - DNA, 20 bp, Homo sapiens
ccttggcctcccaaagtgct

SEQ ID NO: 4863 - DNA, 20 bp, Homo sapiens
tcccaaagtgctgggattac

SEQ ID NO: 4864 - DNA, 20 bp, Homo sapiens
agcttttgggccaggcgcgg

SEQ ID NO: 4865 - DNA, 20 bp, Homo sapiens
caggcgtgagccaccgcgcc

SEQ ID NO: 4866 - DNA, 20 bp, Homo sapiens
taaagcttttgggccaggcg

SEQ ID NO: 4867 - DNA, 20 bp, Homo sapiens
gaaattaaagcttttgggcc

SEQ ID NO: 4868 - DNA, 20 bp, Homo sapiens
attaagaaattaaagctttt

SEQ ID NO: 4869 - DNA, 20 bp, Homo sapiens
aattaagaaattaaagcttt

SEQ ID NO: 4870 - DNA, 20 bp, Homo sapiens
aatacaatcaccagggtagc

SEQ ID NO: 4871 - DNA, 20 bp, Homo sapiens
ttgttttcttccagctaccc

SEQ ID NO: 4872 - DNA, 20 bp, Homo sapiens
aatgctcaatacaatcacca

SEQ ID NO: 4873 - DNA, 20 bp, Homo sapiens
aaatgctcaatacaatcacc

SEQ ID NO: 4874 - DNA, 20 bp, Homo sapiens
tgattgtattgagcattttc

SEQ ID NO: 4875 - DNA, 20 bp, Homo sapiens
gattgtattgagcattttct

SEQ ID NO: 4876 - DNA, 20 bp, Homo sapiens
attgtattgagcattttctg

SEQ ID NO: 4877 - DNA, 20 bp, Homo sapiens
ttctttgctgtaatgactac

SEQ ID NO: 4878 - DNA, 20 bp, Homo sapiens
tgctgtaatgactactggtc

SEQ ID NO: 4879 - DNA, 20 bp, Homo sapiens
tgcccatctggtctcatcac

SEQ ID NO: 4880 - DNA, 20 bp, Homo sapiens
tgacctgtgatgagaccaga

SEQ ID NO: 4881 - DNA, 20 bp, Homo sapiens
gacctgtgatgagaccagat

SEQ ID NO: 4882 - DNA, 20 bp, Homo sapiens
ctccactgcccctgcccatc

SEQ ID NO: 4883 - DNA, 20 bp, Homo sapiens
tgtgatgagaccagatgggc

SEQ ID NO: 4884 - DNA, 20 bp, Homo sapiens
gtgatgagaccagatgggca

SEQ ID NO: 4885 - DNA, 20 bp, Homo sapiens
tgatgagaccagatgggcag

SEQ ID NO: 4886 - DNA, 20 bp, Homo sapiens
gaccagatgggcaggggcag

SEQ ID NO: 4887 - DNA, 20 bp, Homo sapiens
cagatgggcaggggcagtgg

SEQ ID NO: 4888 - DNA, 20 bp, Homo sapiens
aggagattctagagatattt

SEQ ID NO: 4889 - DNA, 20 bp, Homo sapiens
gctgtacttgatgaaaagag

SEQ ID NO: 4890 - DNA, 20 bp, Homo sapiens
ctgtacttgatgaaaagagt

SEQ ID NO: 4891 - DNA, 20 bp, Homo sapiens
tgtacttgatgaaaagagtg

SEQ ID NO: 4892 - DNA, 20 bp, Homo sapiens
atgaaaagagtggggagtta

SEQ ID NO: 4893 - DNA, 20 bp, Homo sapiens
aaagagtggggagttaaggc

SEQ ID NO: 4894 - DNA, 20 bp, Homo sapiens
ctggctgcagatgtatgatt

SEQ ID NO: 4895 - DNA, 20 bp, Homo sapiens
atgtatgatttggcatagag

SEQ ID NO: 4896 - DNA, 20 bp, Homo sapiens
ctgtctctcatctcaggaac

SEQ ID NO: 4897 - DNA, 20 bp, Homo sapiens
ccccttctgtctctcatctc

SEQ ID NO: 4898 - DNA, 20 bp, Homo sapiens
ttcctgagatgagagacaga

SEQ ID NO: 4899 - DNA, 20 bp, Homo sapiens
tcctgagatgagagacagaa

SEQ ID NO: 4900 - DNA, 20 bp, Homo sapiens
cctgagatgagagacagaag

SEQ ID NO: 4901 - DNA, 20 bp, Homo sapiens
gagatgagagacagaagggg

SEQ ID NO: 4902 - DNA, 20 bp, Homo sapiens
agatgagagacagaagggga

SEQ ID NO: 4903 - DNA, 20 bp, Homo sapiens
agagacagaaggggagggac

SEQ ID NO: 4904 - DNA, 20 bp, Homo sapiens
aaggggagggacaggttgtg

SEQ ID NO: 4905 - DNA, 20 bp, Homo sapiens
gaacaatgatatgttcattc

SEQ ID NO: 4906 - DNA, 20 bp, Homo sapiens
aacaatgatatgttcattct

SEQ ID NO: 4907 - DNA, 20 bp, Homo sapiens
tgatatgttcattctgggct

SEQ ID NO: 4908 - DNA, 20 bp, Homo sapiens
tcattctgggcttggagtta

SEQ ID NO: 4909 - DNA, 20 bp, Homo sapiens
cattctgggcttggagttaa

SEQ ID NO: 4910 - DNA, 20 bp, Homo sapiens
attctgggcttggagttaag

SEQ ID NO: 4911 - DNA, 20 bp, Homo sapiens
gcttcccctaagcatatcat

SEQ ID NO: 4912 - DNA, 20 bp, Homo sapiens
aaggggcctatgatatgctt

SEQ ID NO: 4913 - DNA, 20 bp, Homo sapiens
aggggcctatgatatgctta

SEQ ID NO: 4914 - DNA, 20 bp, Homo sapiens
ggggcctatgatatgcttag

SEQ ID NO: 4915 - DNA, 20 bp, Homo sapiens
ggtggctgttatgcagcaat

SEQ ID NO: 4916 - DNA, 20 bp, Homo sapiens
ttaagccactaagtttgggg

SEQ ID NO: 4917 - DNA, 20 bp, Homo sapiens
attttaagccactaagtttg

SEQ ID NO: 4918 - DNA, 20 bp, Homo sapiens
tattttaagccactaagttt

SEQ ID NO: 4919 - DNA, 20 bp, Homo sapiens
ctattttaagccactaagtt

SEQ ID NO: 4920 - DNA, 20 bp, Homo sapiens
aacagccaccccaaacttag

SEQ ID NO: 4921 - DNA, 20 bp, Homo sapiens
atgatcatgagtaaattaaa

SEQ ID NO: 4922 - DNA, 20 bp, Homo sapiens
tactcatgatcatgattctg

SEQ ID NO: 4923 - DNA, 20 bp, Homo sapiens
tgattctgtggtgcaacaac

SEQ ID NO: 4924 - DNA, 20 bp, Homo sapiens
gattctgtggtgcaacaact

SEQ ID NO: 4925 - DNA, 20 bp, Homo sapiens
ctgtggtgcaacaactgggc

SEQ ID NO: 4926 - DNA, 20 bp, Homo sapiens
tgtggtgcaacaactgggct

SEQ ID NO: 4927 - DNA, 20 bp, Homo sapiens
acaactgggctgggttcagc

SEQ ID NO: 4928 - DNA, 20 bp, Homo sapiens
caactgggctgggttcagct

SEQ ID NO: 4929 - DNA, 20 bp, Homo sapiens
ttcttctgttagtttcaccc

SEQ ID NO: 4930 - DNA, 20 bp, Homo sapiens
tcttctgttagtttcaccca

SEQ ID NO: 4931 - DNA, 20 bp, Homo sapiens
gcagatgcatgaatgaccct

SEQ ID NO: 4932 - DNA, 20 bp, Homo sapiens
tgcagatgcatgaatgaccc

SEQ ID NO: 4933 - DNA, 20 bp, Homo sapiens
tcattcatgcatctgcagtt

SEQ ID NO: 4934 - DNA, 20 bp, Homo sapiens
cattcatgcatctgcagttt

SEQ ID NO: 4935 - DNA, 20 bp, Homo sapiens
attcatgcatctgcagtttg

SEQ ID NO: 4936 - DNA, 20 bp, Homo sapiens
catgcatctgcagtttgggg

SEQ ID NO: 4937 - DNA, 20 bp, Homo sapiens
atgcatctgcagtttggggt

SEQ ID NO: 4938 - DNA, 20 bp, Homo sapiens
atctgcagtttggggtggga

SEQ ID NO: 4939 - DNA, 20 bp, Homo sapiens
cacgtgaatgaggtcatctg

SEQ ID NO: 4940 - DNA, 20 bp, Homo sapiens
aactgccaaacacgtgaatg

SEQ ID NO: 4941 - DNA, 20 bp, Homo sapiens
gatgacctcattcacgtgtt

SEQ ID NO: 4942 - DNA, 20 bp, Homo sapiens
tcattcacgtgtttggcagt

SEQ ID NO: 4943 - DNA, 20 bp, Homo sapiens
tttggcagttggtgattcac

SEQ ID NO: 4944 - DNA, 20 bp, Homo sapiens
ttggcagttggtgattcact

SEQ ID NO: 4945 - DNA, 20 bp, Homo sapiens
tggcagttggtgattcactg

SEQ ID NO: 4946 - DNA, 20 bp, Homo sapiens
ggcagttggtgattcactgg

SEQ ID NO: 4947 - DNA, 20 bp, Homo sapiens
gtaggcgattgttacagtaa

SEQ ID NO: 4948 - DNA, 20 bp, Homo sapiens
tactgtaacaatcgcctacc

SEQ ID NO: 4949 - DNA, 20 bp, Homo sapiens
ttagggaagctctgcctggt

SEQ ID NO: 4950 - DNA, 20 bp, Homo sapiens
agccttagggaagctctgcc

SEQ ID NO: 4951 - DNA, 20 bp, Homo sapiens
taccaggcagagcttcccta

SEQ ID NO: 4952 - DNA, 20 bp, Homo sapiens
ctcctagtttggaagcctta

SEQ ID NO: 4953 - DNA, 20 bp, Homo sapiens
tctcctagtttggaagcctt

SEQ ID NO: 4954 - DNA, 20 bp, Homo sapiens
ttccctaaggcttccaaact

SEQ ID NO: 4955 - DNA, 20 bp, Homo sapiens
cccaggatagtctcctagtt

SEQ ID NO: 4956 - DNA, 20 bp, Homo sapiens
tccaaactaggagactatcc

SEQ ID NO: 4957 - DNA, 20 bp, Homo sapiens
ccaaactaggagactatcct

SEQ ID NO: 4958 - DNA, 20 bp, Homo sapiens
gtatccacagcacaggaccc

SEQ ID NO: 4959 - DNA, 20 bp, Homo sapiens
ctatcctgggtcctgtgctg

SEQ ID NO: 4960 - DNA, 20 bp, Homo sapiens
ctgagtggtatccacagcac

SEQ ID NO: 4961 - DNA, 20 bp, Homo sapiens
ggtggggatgggggactgag

SEQ ID NO: 4962 - DNA, 20 bp, Homo sapiens
ggaatatggggtggggatgg

SEQ ID NO: 4963 - DNA, 20 bp, Homo sapiens
aggaatatggggtggggatg

SEQ ID NO: 4964 - DNA, 20 bp, Homo sapiens
gaggaatatggggtggggat

SEQ ID NO: 4965 - DNA, 20 bp, Homo sapiens
tgaggaatatggggtgggga

SEQ ID NO: 4966 - DNA, 20 bp, Homo sapiens
cctttgaggaatatggggtg

SEQ ID NO: 4967 - DNA, 20 bp, Homo sapiens
gcctttgaggaatatggggt

SEQ ID NO: 4968 - DNA, 20 bp, Homo sapiens
tgcctttgaggaatatgggg

SEQ ID NO: 4969 - DNA, 20 bp, Homo sapiens
ctctgcctttgaggaatatg

SEQ ID NO: 4970 - DNA, 20 bp, Homo sapiens
tctctgcctttgaggaatat

SEQ ID NO: 4971 - DNA, 20 bp, Homo sapiens
ctctctgcctttgaggaata

SEQ ID NO: 4972 - DNA, 20 bp, Homo sapiens
ccccaccccatattcctcaa

SEQ ID NO: 4973 - DNA, 20 bp, Homo sapiens
agcccctctctctgcctttg

SEQ ID NO: 4974 - DNA, 20 bp, Homo sapiens
tattcctcaaaggcagagag

SEQ ID NO: 4975 - DNA, 20 bp, Homo sapiens
attcctcaaaggcagagaga

SEQ ID NO: 4976 - DNA, 20 bp, Homo sapiens
ttcctcaaaggcagagagag

SEQ ID NO: 4977 - DNA, 20 bp, Homo sapiens
gaggggctactagaagacag

SEQ ID NO: 4978 - DNA, 20 bp, Homo sapiens
tggagtgtttacatgtcact

SEQ ID NO: 4979 - DNA, 20 bp, Homo sapiens
ttggagtgtttacatgtcac

SEQ ID NO: 4980 - DNA, 20 bp, Homo sapiens
catgtaaacactccaaaccc

SEQ ID NO: 4981 - DNA, 20 bp, Homo sapiens
gtgtggaaggtgccagggtt

SEQ ID NO: 4982 - DNA, 20 bp, Homo sapiens
ctgcagtgtggaaggtgcca

SEQ ID NO: 4983 - DNA, 20 bp, Homo sapiens
gctgcagtgtggaaggtgcc

SEQ ID NO: 4984 - DNA, 20 bp, Homo sapiens
gaccaaagctgcagtgtgga

SEQ ID NO: 4985 - DNA, 20 bp, Homo sapiens
ggcagaccaaagctgcagtg

SEQ ID NO: 4986 - DNA, 20 bp, Homo sapiens
caccttccacactgcagctt

SEQ ID NO: 4987 - DNA, 20 bp, Homo sapiens
gcagctttggtctgcccctt

SEQ ID NO: 4988 - DNA, 20 bp, Homo sapiens
cagctttggtctgccccttt

SEQ ID NO: 4989 - DNA, 20 bp, Homo sapiens
aaaacagagatttcccaaag

SEQ ID NO: 4990 - DNA, 20 bp, Homo sapiens
aaaaacagagatttcccaaa

SEQ ID NO: 4991 - DNA, 20 bp, Homo sapiens
gaaaaacagagatttcccaa

SEQ ID NO: 4992 - DNA, 20 bp, Homo sapiens
aaatctctgtttttcttccc

SEQ ID NO: 4993 - DNA, 20 bp, Homo sapiens
tctcacccctccagcagcct

SEQ ID NO: 4994 - DNA, 20 bp, Homo sapiens
tgtttttcttcccaggctgc

SEQ ID NO: 4995 - DNA, 20 bp, Homo sapiens
ctctcacccctccagcagcc

SEQ ID NO: 4996 - DNA, 20 bp, Homo sapiens
ttttcttcccaggctgctgg

SEQ ID NO: 4997 - DNA, 20 bp, Homo sapiens
tttcttcccaggctgctgga

SEQ ID NO: 4998 - DNA, 20 bp, Homo sapiens
ttcttcccaggctgctggag

SEQ ID NO: 4999 - DNA, 20 bp, Homo sapiens
gctggaggggtgagagtcgc

SEQ ID NO: 5000 - DNA, 20 bp, Homo sapiens
gcccacagcctctactctac

SEQ ID NO: 5001 - DNA, 20 bp, Homo sapiens
gagagtcgccggtagagtag

SEQ ID NO: 5002 - DNA, 20 bp, Homo sapiens
cgccggtagagtagaggctg

SEQ ID NO: 5003 - DNA, 20 bp, Homo sapiens
gccggtagagtagaggctgt

SEQ ID NO: 5004 - DNA, 20 bp, Homo sapiens
tagagtagaggctgtgggcg

SEQ ID NO: 5005 - DNA, 20 bp, Homo sapiens
agtagaggctgtgggcgagg

SEQ ID NO: 5006 - DNA, 20 bp, Homo sapiens
agaggctgtgggcgaggagg

SEQ ID NO: 5007 - DNA, 20 bp, Homo sapiens
ggctgtgggcgaggaggtgg

SEQ ID NO: 5008 - DNA, 20 bp, Homo sapiens
gaggaggtggcggcctcctg

SEQ ID NO: 5009 - DNA, 20 bp, Homo sapiens
aagaccactgcagcctcagg

SEQ ID NO: 5010 - DNA, 20 bp, Homo sapiens
ggaaagaccactgcagcctc

SEQ ID NO: 5011 - DNA, 20 bp, Homo sapiens
gcggcctcctgaggctgcag

SEQ ID NO: 5012 - DNA, 20 bp, Homo sapiens
gaggctgcagtggtctttcc

SEQ ID NO: 5013 - DNA, 20 bp, Homo sapiens
cctgtgctcccactgctgcc

SEQ ID NO: 5014 - DNA, 20 bp, Homo sapiens
gtggtctttccaggcagcag

SEQ ID NO: 5015 - DNA, 20 bp, Homo sapiens
tggtctttccaggcagcagt

SEQ ID NO: 5016 - DNA, 20 bp, Homo sapiens
ccaggcagcagtgggagcac

SEQ ID NO: 5017 - DNA, 20 bp, Homo sapiens
caggcagcagtgggagcaca

SEQ ID NO: 5018 - DNA, 20 bp, Homo sapiens
gcagcagtgggagcacaggg

SEQ ID NO: 5019 - DNA, 20 bp, Homo sapiens
gcagtgggagcacagggtgg

SEQ ID NO: 5020 - DNA, 20 bp, Homo sapiens
cttcactctcccaggctcta

SEQ ID NO: 5021 - DNA, 20 bp, Homo sapiens
tggaggtcaaccctagagcc

SEQ ID NO: 5022 - DNA, 20 bp, Homo sapiens
gcttcactctcccaggctct

SEQ ID NO: 5023 - DNA, 20 bp, Homo sapiens
ggaggtcaaccctagagcct

SEQ ID NO: 5024 - DNA, 20 bp, Homo sapiens
acacccagcttcactctccc

SEQ ID NO: 5025 - DNA, 20 bp, Homo sapiens
agagcctgggagagtgaagc

SEQ ID NO: 5026 - DNA, 20 bp, Homo sapiens
gagcctgggagagtgaagct

SEQ ID NO: 5027 - DNA, 20 bp, Homo sapiens
gggtgtgacttcagagctgt

SEQ ID NO: 5028 - DNA, 20 bp, Homo sapiens
gttggtgctgaagtttctgc

SEQ ID NO: 5029 - DNA, 20 bp, Homo sapiens
tgaagtttctgcaggccaga

SEQ ID NO: 5030 - DNA, 20 bp, Homo sapiens
agtttctgcaggccagaagg

SEQ ID NO: 5031 - DNA, 20 bp, Homo sapiens
gtttctgcaggccagaagga

SEQ ID NO: 5032 - DNA, 20 bp, Homo sapiens
cccactcttgcccctccttc

SEQ ID NO: 5033 - DNA, 20 bp, Homo sapiens
tttctgcaggccagaaggag

SEQ ID NO: 5034 - DNA, 20 bp, Homo sapiens
gccagaaggaggggcaagag

SEQ ID NO: 5035 - DNA, 20 bp, Homo sapiens
ccagaaggaggggcaagagt

SEQ ID NO: 5036 - DNA, 20 bp, Homo sapiens
gaaggaggggcaagagtggg

SEQ ID NO: 5037 - DNA, 20 bp, Homo sapiens
aaggaggggcaagagtggga

SEQ ID NO: 5038 - DNA, 20 bp, Homo sapiens
aggaggggcaagagtgggag

SEQ ID NO: 5039 - DNA, 20 bp, Homo sapiens
ggaggggcaagagtgggagg

SEQ ID NO: 5040 - DNA, 20 bp, Homo sapiens
ggggcgcagatccagaatca

SEQ ID NO: 5041 - DNA, 20 bp, Homo sapiens
gtcagctgcctccgtgattc

SEQ ID NO: 5042 - DNA, 20 bp, Homo sapiens
gcgcagatccagaatcacgg

SEQ ID NO: 5043 - DNA, 20 bp, Homo sapiens
gaatcacggaggcagctgac

SEQ ID NO: 5044 - DNA, 20 bp, Homo sapiens
tcacggaggcagctgaccgg

SEQ ID NO: 5045 - DNA, 20 bp, Homo sapiens
cggaggcagctgaccggagg

SEQ ID NO: 5046 - DNA, 20 bp, Homo sapiens
ccttgggcagctgcctcctc

SEQ ID NO: 5047 - DNA, 20 bp, Homo sapiens
ccggaggaggcagctgccca

SEQ ID NO: 5048 - DNA, 20 bp, Homo sapiens
cggaggaggcagctgcccaa

SEQ ID NO: 5049 - DNA, 20 bp, Homo sapiens
ggaggaggcagctgcccaag

SEQ ID NO: 5050 - DNA, 20 bp, Homo sapiens
ccttctgagtccatcccctt

SEQ ID NO: 5051 - DNA, 20 bp, Homo sapiens
gaggcagctgcccaagggga

SEQ ID NO: 5052 - DNA, 20 bp, Homo sapiens
gccttctgagtccatcccct

SEQ ID NO: 5053 - DNA, 20 bp, Homo sapiens
cccaaggggatggactcaga

SEQ ID NO: 5054 - DNA, 20 bp, Homo sapiens
tcgtttggataacagcactt

SEQ ID NO: 5055 - DNA, 20 bp, Homo sapiens
ccacttgcaaagagttcgtt

SEQ ID NO: 5056 - DNA, 20 bp, Homo sapiens
ccaaacgaactctttgcaag

SEQ ID NO: 5057 - DNA, 20 bp, Homo sapiens
gcaagtggtctctttgcaac

SEQ ID NO: 5058 - DNA, 20 bp, Homo sapiens
tggtctctttgcaacaggcc

SEQ ID NO: 5059 - DNA, 20 bp, Homo sapiens
ggtctctttgcaacaggcct

SEQ ID NO: 5060 - DNA, 20 bp, Homo sapiens
gtctctttgcaacaggcctg

SEQ ID NO: 5061 - DNA, 20 bp, Homo sapiens
tctctttgcaacaggcctgg

SEQ ID NO: 5062 - DNA, 20 bp, Homo sapiens
aggcaagactgctctccccc

SEQ ID NO: 5063 - DNA, 20 bp, Homo sapiens
ctgattagcggtgtgacttt

SEQ ID NO: 5064 - DNA, 20 bp, Homo sapiens
ccgtgccggccgctgattag

SEQ ID NO: 5065 - DNA, 20 bp, Homo sapiens
aaagtcacaccgctaatcag

SEQ ID NO: 5066 - DNA, 20 bp, Homo sapiens
tcacaccgctaatcagcggc

SEQ ID NO: 5067 - DNA, 20 bp, Homo sapiens
ccgctaatcagcggccggca

SEQ ID NO: 5068 - DNA, 20 bp, Homo sapiens
cgctaatcagcggccggcac

SEQ ID NO: 5069 - DNA, 20 bp, Homo sapiens
gctaatcagcggccggcacg

SEQ ID NO: 5070 - DNA, 20 bp, Homo sapiens
tagtaactgttaccccgtgc

SEQ ID NO: 5071 - DNA, 20 bp, Homo sapiens
actcactacgtacccaatgc

SEQ ID NO: 5072 - DNA, 20 bp, Homo sapiens
ctcactacgtacccaatgct

SEQ ID NO: 5073 - DNA, 20 bp, Homo sapiens
aagtcacttcgcccagcatt

SEQ ID NO: 5074 - DNA, 20 bp, Homo sapiens
caagtcacttcgcccagcat

SEQ ID NO: 5075 - DNA, 20 bp, Homo sapiens
gccatgagcattgagctcgc

SEQ ID NO: 5076 - DNA, 20 bp, Homo sapiens
gccagcgagctcaatgctca

SEQ ID NO: 5077 - DNA, 20 bp, Homo sapiens
aaacaatgccagctgctcag

SEQ ID NO: 5078 - DNA, 20 bp, Homo sapiens
atggcaatcctctgagcagc

SEQ ID NO: 5079 - DNA, 20 bp, Homo sapiens
tcatctcaattttacagctc

SEQ ID NO: 5080 - DNA, 20 bp, Homo sapiens
aattttacagctcaggaagc

SEQ ID NO: 5081 - DNA, 20 bp, Homo sapiens
attttacagctcaggaagct

SEQ ID NO: 5082 - DNA, 20 bp, Homo sapiens
ctcaggaagctgggacacag

SEQ ID NO: 5083 - DNA, 20 bp, Homo sapiens
tgggacacagaggaagagcc

SEQ ID NO: 5084 - DNA, 20 bp, Homo sapiens
ggttgtcagtgttcagagcc

SEQ ID NO: 5085 - DNA, 20 bp, Homo sapiens
acagtgtgggtctctcaatc

SEQ ID NO: 5086 - DNA, 20 bp, Homo sapiens
gtaacggtgatgaacagtgt

SEQ ID NO: 5087 - DNA, 20 bp, Homo sapiens
cgtaacggtgatgaacagtg

SEQ ID NO: 5088 - DNA, 20 bp, Homo sapiens
atacagcatatatagcgtaa

SEQ ID NO: 5089 - DNA, 20 bp, Homo sapiens
gctatatatgctgtatagaa

SEQ ID NO: 5090 - DNA, 20 bp, Homo sapiens
tatatgctgtatagaaaggc

SEQ ID NO: 5091 - DNA, 20 bp, Homo sapiens
tgctgtatagaaaggcagga

SEQ ID NO: 5092 - DNA, 20 bp, Homo sapiens
agaaaggcaggatggcataa

SEQ ID NO: 5093 - DNA, 20 bp, Homo sapiens
atggcataatggttaaacct

SEQ ID NO: 5094 - DNA, 20 bp, Homo sapiens
cataatggttaaacctaggt

SEQ ID NO: 5095 - DNA, 20 bp, Homo sapiens
gattcaaaccctacctacct

SEQ ID NO: 5096 - DNA, 20 bp, Homo sapiens
atggttaaacctaggtaggt

SEQ ID NO: 5097 - DNA, 20 bp, Homo sapiens
tggttaaacctaggtaggta

SEQ ID NO: 5098 - DNA, 20 bp, Homo sapiens
agctagtaaatggtagcagg

SEQ ID NO: 5099 - DNA, 20 bp, Homo sapiens
cagagctagtaaatggtagc

SEQ ID NO: 5100 - DNA, 20 bp, Homo sapiens
caagtcacagagctagtaaa

SEQ ID NO: 5101 - DNA, 20 bp, Homo sapiens
catttactagctctgtgact

SEQ ID NO: 5102 - DNA, 20 bp, Homo sapiens
ggggaaagggaggcacagag

SEQ ID NO: 5103 - DNA, 20 bp, Homo sapiens
ttttagagatggggaaaggg

SEQ ID NO: 5104 - DNA, 20 bp, Homo sapiens
ccattttagagatggggaaa

SEQ ID NO: 5105 - DNA, 20 bp, Homo sapiens
cccattttagagatggggaa

SEQ ID NO: 5106 - DNA, 20 bp, Homo sapiens
ttatccccattttagagatg

SEQ ID NO: 5107 - DNA, 20 bp, Homo sapiens
attatccccattttagagat

SEQ ID NO: 5108 - DNA, 20 bp, Homo sapiens
tattatccccattttagaga

SEQ ID NO: 5109 - DNA, 20 bp, Homo sapiens
ccctttccccatctctaaaa

SEQ ID NO: 5110 - DNA, 20 bp, Homo sapiens
cctttccccatctctaaaat

SEQ ID NO: 5111 - DNA, 20 bp, Homo sapiens
ctttccccatctctaaaatg

SEQ ID NO: 5112 - DNA, 20 bp, Homo sapiens
ccacaacagcctcaggtagg

SEQ ID NO: 5113 - DNA, 20 bp, Homo sapiens
taaatcgtacctcctacctg

SEQ ID NO: 5114 - DNA, 20 bp, Homo sapiens
agcccacaacagcctcaggt

SEQ ID NO: 5115 - DNA, 20 bp, Homo sapiens
acttagcccacaacagcctc

SEQ ID NO: 5116 - DNA, 20 bp, Homo sapiens
cctcctacctgaggctgttg

SEQ ID NO: 5117 - DNA, 20 bp, Homo sapiens
ctcctacctgaggctgttgt

SEQ ID NO: 5118 - DNA, 20 bp, Homo sapiens
tgttgtgggctaagtctgta

SEQ ID NO: 5119 - DNA, 20 bp, Homo sapiens
aaggcacgtagaacagtgcc

SEQ ID NO: 5120 - DNA, 20 bp, Homo sapiens
gtagaacagtgcctggaacg

SEQ ID NO: 5121 - DNA, 20 bp, Homo sapiens
tagacagtaccccacgttcc

SEQ ID NO: 5122 - DNA, 20 bp, Homo sapiens
tagaacagtgcctggaacgt

SEQ ID NO: 5123 - DNA, 20 bp, Homo sapiens
agaacagtgcctggaacgtg

SEQ ID NO: 5124 - DNA, 20 bp, Homo sapiens
ctcaccattgttgtaacagc

SEQ ID NO: 5125 - DNA, 20 bp, Homo sapiens
tgtgcctgctgttacaacaa

SEQ ID NO: 5126 - DNA, 20 bp, Homo sapiens
tagttcagcagcgagagata

SEQ ID NO: 5127 - DNA, 20 bp, Homo sapiens
tctctcgctgctgaactacc

SEQ ID NO: 5128 - DNA, 20 bp, Homo sapiens
ttgcagaaagaagtctaacc

SEQ ID NO: 5129 - DNA, 20 bp, Homo sapiens
acttctttctgcaagtcatg

SEQ ID NO: 5130 - DNA, 20 bp, Homo sapiens
ctttcataaacttttcctga

SEQ ID NO: 5131 - DNA, 20 bp, Homo sapiens
acattctacggaaagccttc

SEQ ID NO: 5132 - DNA, 20 bp, Homo sapiens
gaggggaattgtacattcta

SEQ ID NO: 5133 - DNA, 20 bp, Homo sapiens
tagaatgtacaattcccctc

SEQ ID NO: 5134 - DNA, 20 bp, Homo sapiens
agaatgtacaattcccctct

SEQ ID NO: 5135 - DNA, 20 bp, Homo sapiens
gcccatgcctggacccagag

SEQ ID NO: 5136 - DNA, 20 bp, Homo sapiens
cgcccatgcctggacccaga

SEQ ID NO: 5137 - DNA, 20 bp, Homo sapiens
gcgcccatgcctggacccag

SEQ ID NO: 5138 - DNA, 20 bp, Homo sapiens
tacaattcccctctgggtcc

SEQ ID NO: 5139 - DNA, 20 bp, Homo sapiens
ttcccctctgggtccaggca

SEQ ID NO: 5140 - DNA, 20 bp, Homo sapiens
tcccctctgggtccaggcat

SEQ ID NO: 5141 - DNA, 20 bp, Homo sapiens
gctacccgggcgcccatgcc

SEQ ID NO: 5142 - DNA, 20 bp, Homo sapiens
tgggtccaggcatgggcgcc

SEQ ID NO: 5143 - DNA, 20 bp, Homo sapiens
gggtccaggcatgggcgccc

SEQ ID NO: 5144 - DNA, 20 bp, Homo sapiens
aagaagtggatgtgctaccc

SEQ ID NO: 5145 - DNA, 20 bp, Homo sapiens
taagaagtggatgtgctacc

SEQ ID NO: 5146 - DNA, 20 bp, Homo sapiens
tgttcaggggtgataagaag

SEQ ID NO: 5147 - DNA, 20 bp, Homo sapiens
atgggctctaaggtgttcag

SEQ ID NO: 5148 - DNA, 20 bp, Homo sapiens
gatgggctctaaggtgttca

SEQ ID NO: 5149 - DNA, 20 bp, Homo sapiens
tgatgggctctaaggtgttc

SEQ ID NO: 5150 - DNA, 20 bp, Homo sapiens
tgataagctgatgggctcta

SEQ ID NO: 5151 - DNA, 20 bp, Homo sapiens
tgctggtttgataagctgat

SEQ ID NO: 5152 - DNA, 20 bp, Homo sapiens
ctgctggtttgataagctga

SEQ ID NO: 5153 - DNA, 20 bp, Homo sapiens
tctgcactcacatcagctgc

SEQ ID NO: 5154 - DNA, 20 bp, Homo sapiens
agtgcagagcagactgtgag

SEQ ID NO: 5155 - DNA, 20 bp, Homo sapiens
gcagagcagactgtgagagg

SEQ ID NO: 5156 - DNA, 20 bp, Homo sapiens
gagcagactgtgagaggtgg

SEQ ID NO: 5157 - DNA, 20 bp, Homo sapiens
ggtggaggctgataccagtg

SEQ ID NO: 5158 - DNA, 20 bp, Homo sapiens
ccagcttggagcatcctcac

SEQ ID NO: 5159 - DNA, 20 bp, Homo sapiens
ccagtgaggatgctccaagc

SEQ ID NO: 5160 - DNA, 20 bp, Homo sapiens
cagtgaggatgctccaagct

SEQ ID NO: 5161 - DNA, 20 bp, Homo sapiens
ttcagggctgggtcccagct

SEQ ID NO: 5162 - DNA, 20 bp, Homo sapiens
tgggctcccgcttcagggct

SEQ ID NO: 5163 - DNA, 20 bp, Homo sapiens
ctgggctcccgcttcagggc

SEQ ID NO: 5164 - DNA, 20 bp, Homo sapiens
gctgggacccagccctgaag

SEQ ID NO: 5165 - DNA, 20 bp, Homo sapiens
ctgggacccagccctgaagc

SEQ ID NO: 5166 - DNA, 20 bp, Homo sapiens
ttatctgggctcccgcttca

SEQ ID NO: 5167 - DNA, 20 bp, Homo sapiens
attatctgggctcccgcttc

SEQ ID NO: 5168 - DNA, 20 bp, Homo sapiens
tgaagcgggagcccagataa

SEQ ID NO: 5169 - DNA, 20 bp, Homo sapiens
tttccacccatccattatct

SEQ ID NO: 5170 - DNA, 20 bp, Homo sapiens
atttccacccatccattatc

SEQ ID NO: 5171 - DNA, 20 bp, Homo sapiens
gcgggagcccagataatgga

SEQ ID NO: 5172 - DNA, 20 bp, Homo sapiens
cgggagcccagataatggat

SEQ ID NO: 5173 - DNA, 20 bp, Homo sapiens
gagcccagataatggatggg

SEQ ID NO: 5174 - DNA, 20 bp, Homo sapiens
agataatggatgggtggaaa

SEQ ID NO: 5175 - DNA, 20 bp, Homo sapiens
gataatggatgggtggaaat

SEQ ID NO: 5176 - DNA, 20 bp, Homo sapiens
tggatgggtggaaatgggcc

SEQ ID NO: 5177 - DNA, 20 bp, Homo sapiens
tcccacttctcctgggctcc

SEQ ID NO: 5178 - DNA, 20 bp, Homo sapiens
tggaaatgggcctggagccc

SEQ ID NO: 5179 - DNA, 20 bp, Homo sapiens
ctcatcctcccacttctcct

SEQ ID NO: 5180 - DNA, 20 bp, Homo sapiens
cctcatcctcccacttctcc

SEQ ID NO: 5181 - DNA, 20 bp, Homo sapiens
ggcctggagcccaggagaag

SEQ ID NO: 5182 - DNA, 20 bp, Homo sapiens
gcctggagcccaggagaagt

SEQ ID NO: 5183 - DNA, 20 bp, Homo sapiens
tggagcccaggagaagtggg

SEQ ID NO: 5184 - DNA, 20 bp, Homo sapiens
ccaggagaagtgggaggatg

SEQ ID NO: 5185 - DNA, 20 bp, Homo sapiens
caggagaagtgggaggatga

SEQ ID NO: 5186 - DNA, 20 bp, Homo sapiens
aggagaagtgggaggatgag

SEQ ID NO: 5187 - DNA, 20 bp, Homo sapiens
ggagaagtgggaggatgagg

SEQ ID NO: 5188 - DNA, 20 bp, Homo sapiens
aagtgggaggatgagggggc

SEQ ID NO: 5189 - DNA, 20 bp, Homo sapiens
agtgggaggatgagggggca

SEQ ID NO: 5190 - DNA, 20 bp, Homo sapiens
gtgggaggatgagggggcag

SEQ ID NO: 5191 - DNA, 20 bp, Homo sapiens
tgggaggatgagggggcagg

SEQ ID NO: 5192 - DNA, 20 bp, Homo sapiens
gaggatgagggggcaggggg

SEQ ID NO: 5193 - DNA, 20 bp, Homo sapiens
aggaaataacatttgatttc

SEQ ID NO: 5194 - DNA, 20 bp, Homo sapiens
tcatgcaccccaaactggtc

SEQ ID NO: 5195 - DNA, 20 bp, Homo sapiens
atgttatttcctgaccagtt

SEQ ID NO: 5196 - DNA, 20 bp, Homo sapiens
tgttatttcctgaccagttt

SEQ ID NO: 5197 - DNA, 20 bp, Homo sapiens
gttatttcctgaccagtttg

SEQ ID NO: 5198 - DNA, 20 bp, Homo sapiens
agagctcatgcaccccaaac

SEQ ID NO: 5199 - DNA, 20 bp, Homo sapiens
tgagctctgtcaacagctca

SEQ ID NO: 5200 - DNA, 20 bp, Homo sapiens
cagccaacaagatgaaatta

SEQ ID NO: 5201 - DNA, 20 bp, Homo sapiens
tcagccaacaagatgaaatt

SEQ ID NO: 5202 - DNA, 20 bp, Homo sapiens
ctgccctaatttcatcttgt

SEQ ID NO: 5203 - DNA, 20 bp, Homo sapiens
taatttcatcttgttggctg

SEQ ID NO: 5204 - DNA, 20 bp, Homo sapiens
tgaggcacaattcctctctc

SEQ ID NO: 5205 - DNA, 20 bp, Homo sapiens
gaggcacaattcctctctca

SEQ ID NO: 5206 - DNA, 20 bp, Homo sapiens
ctctacactgtccctgagag

SEQ ID NO: 5207 - DNA, 20 bp, Homo sapiens
tcagggacagtgtagagcct

SEQ ID NO: 5208 - DNA, 20 bp, Homo sapiens
cagggacagtgtagagcctt

SEQ ID NO: 5209 - DNA, 20 bp, Homo sapiens
agggacagtgtagagccttg

SEQ ID NO: 5210 - DNA, 20 bp, Homo sapiens
gacagtgtagagccttgggg

SEQ ID NO: 5211 - DNA, 20 bp, Homo sapiens
gctcagggccttcctcccca

SEQ ID NO: 5212 - DNA, 20 bp, Homo sapiens
gtgtagagccttggggagga

SEQ ID NO: 5213 - DNA, 20 bp, Homo sapiens
attccaggtatacgcgctca

SEQ ID NO: 5214 - DNA, 20 bp, Homo sapiens
gattccaggtatacgcgctc

SEQ ID NO: 5215 - DNA, 20 bp, Homo sapiens
aggccctgagcgcgtatacc

SEQ ID NO: 5216 - DNA, 20 bp, Homo sapiens
gagcgcgtatacctggaatc

SEQ ID NO: 5217 - DNA, 20 bp, Homo sapiens
gatcccgattccctgattcc

SEQ ID NO: 5218 - DNA, 20 bp, Homo sapiens
agcgcgtatacctggaatca

SEQ ID NO: 5219 - DNA, 20 bp, Homo sapiens
tatacctggaatcagggaat

SEQ ID NO: 5220 - DNA, 20 bp, Homo sapiens
atacctggaatcagggaatc

SEQ ID NO: 5221 - DNA, 20 bp, Homo sapiens
ggaatcagggaatcgggatc

SEQ ID NO: 5222 - DNA, 20 bp, Homo sapiens
gaatcagggaatcgggatca

SEQ ID NO: 5223 - DNA, 20 bp, Homo sapiens
aatcagggaatcgggatcag

SEQ ID NO: 5224 - DNA, 20 bp, Homo sapiens
tcctgggtgggggctttatt

SEQ ID NO: 5225 - DNA, 20 bp, Homo sapiens
atcctgggtgggggctttat

SEQ ID NO: 5226 - DNA, 20 bp, Homo sapiens
gcccaataaagcccccaccc

SEQ ID NO: 5227 - DNA, 20 bp, Homo sapiens
agtcagaggatcctgggtgg

SEQ ID NO: 5228 - DNA, 20 bp, Homo sapiens
aagtcagaggatcctgggtg

SEQ ID NO: 5229 - DNA, 20 bp, Homo sapiens
gaagtcagaggatcctgggt

SEQ ID NO: 5230 - DNA, 20 bp, Homo sapiens
ggaagtcagaggatcctggg

SEQ ID NO: 5231 - DNA, 20 bp, Homo sapiens
tgaggaagtcagaggatcct

SEQ ID NO: 5232 - DNA, 20 bp, Homo sapiens
atgaggaagtcagaggatcc

SEQ ID NO: 5233 - DNA, 20 bp, Homo sapiens
aaaagagatgaggaagtcag

SEQ ID NO: 5234 - DNA, 20 bp, Homo sapiens
aaaaaaaaaaaaaagagatg

SEQ ID NO: 5235 - DNA, 20 bp, Homo sapiens
gcagtctcactctgtcatcc

SEQ ID NO: 5236 - DNA, 20 bp, Homo sapiens
tctcactctgtcatccaggc

SEQ ID NO: 5237 - DNA, 20 bp, Homo sapiens
cgcaccactgtactccagcc

SEQ ID NO: 5238 - DNA, 20 bp, Homo sapiens
tcatccaggctggagtacag

SEQ ID NO: 5239 - DNA, 20 bp, Homo sapiens
ggagtacagtggtgcgatct

SEQ ID NO: 5240 - DNA, 20 bp, Homo sapiens
cgcttgaacccagaaggctg

SEQ ID NO: 5241 - DNA, 20 bp, Homo sapiens
tcactgcaacctcagccttc

SEQ ID NO: 5242 - DNA, 20 bp, Homo sapiens
cactgcaacctcagccttct

SEQ ID NO: 5243 - DNA, 20 bp, Homo sapiens
gagaatcgcttgaacccaga

SEQ ID NO: 5244 - DNA, 20 bp, Homo sapiens
gctactcaggaggctgaggc

SEQ ID NO: 5245 - DNA, 20 bp, Homo sapiens
cccagctactcaggaggctg

SEQ ID NO: 5246 - DNA, 20 bp, Homo sapiens
tgtaatcccagctactcagg

SEQ ID NO: 5247 - DNA, 20 bp, Homo sapiens
gcctgtaatcccagctactc

SEQ ID NO: 5248 - DNA, 20 bp, Homo sapiens
gcctcagcctcctgagtagc

SEQ ID NO: 5249 - DNA, 20 bp, Homo sapiens
cctcagcctcctgagtagct

SEQ ID NO: 5250 - DNA, 20 bp, Homo sapiens
tcctgagtagctgggattac

SEQ ID NO: 5251 - DNA, 20 bp, Homo sapiens
caaaaattagcctggcatgg

SEQ ID NO: 5252 - DNA, 20 bp, Homo sapiens
caggcatgcgccaccatgcc

SEQ ID NO: 5253 - DNA, 20 bp, Homo sapiens
atacaaaaattagcctggca

SEQ ID NO: 5254 - DNA, 20 bp, Homo sapiens
taaaaatacaaaaattagcc

SEQ ID NO: 5255 - DNA, 20 bp, Homo sapiens
ttttgtatttttagtagaga

SEQ ID NO: 5256 - DNA, 20 bp, Homo sapiens
tttgtatttttagtagagac

SEQ ID NO: 5257 - DNA, 20 bp, Homo sapiens
ttgtatttttagtagagacg

SEQ ID NO: 5258 - DNA, 20 bp, Homo sapiens
gagacggggtttcaccatgt

SEQ ID NO: 5259 - DNA, 20 bp, Homo sapiens
tgagaccagcctggccaaca

SEQ ID NO: 5260 - DNA, 20 bp, Homo sapiens
ggggtttcaccatgttggcc

SEQ ID NO: 5261 - DNA, 20 bp, Homo sapiens
tttcaccatgttggccaggc

SEQ ID NO: 5262 - DNA, 20 bp, Homo sapiens
tcaggagtttgagaccagcc

SEQ ID NO: 5263 - DNA, 20 bp, Homo sapiens
tgggcagatcacttgaagtc

SEQ ID NO: 5264 - DNA, 20 bp, Homo sapiens
gcactttgggaggctgaggt

SEQ ID NO: 5265 - DNA, 20 bp, Homo sapiens
agcactttgggaggctgagg

SEQ ID NO: 5266 - DNA, 20 bp, Homo sapiens
cctagcactttgggaggctg

SEQ ID NO: 5267 - DNA, 20 bp, Homo sapiens
tgtaatcctagcactttggg

SEQ ID NO: 5268 - DNA, 20 bp, Homo sapiens
gtctgtaatcctagcacttt

SEQ ID NO: 5269 - DNA, 20 bp, Homo sapiens
tgtctgtaatcctagcactt

SEQ ID NO: 5270 - DNA, 20 bp, Homo sapiens
cctcagcctcccaaagtgct

SEQ ID NO: 5271 - DNA, 20 bp, Homo sapiens
aaaaaaaaggccaggcacag

SEQ ID NO: 5272 - DNA, 20 bp, Homo sapiens
cagacataagccactgtgcc

SEQ ID NO: 5273 - DNA, 20 bp, Homo sapiens
aaaaaaaaaaaaaaaaggcc

SEQ ID NO: 5274 - DNA, 20 bp, Homo sapiens
ttttttttttttttgtaaac

SEQ ID NO: 5275 - DNA, 20 bp, Homo sapiens
tttttttttttttgtaaaca

SEQ ID NO: 5276 - DNA, 20 bp, Homo sapiens
ccagcagcctgggtgacaga

SEQ ID NO: 5277 - DNA, 20 bp, Homo sapiens
tccagcagcctgggtgacag

SEQ ID NO: 5278 - DNA, 20 bp, Homo sapiens
agggtctccctctgtcaccc

SEQ ID NO: 5279 - DNA, 20 bp, Homo sapiens
ccactacactccagcagcct

SEQ ID NO: 5280 - DNA, 20 bp, Homo sapiens
ccctctgtcacccaggctgc

SEQ ID NO: 5281 - DNA, 20 bp, Homo sapiens
accactacactccagcagcc

SEQ ID NO: 5282 - DNA, 20 bp, Homo sapiens
cccaggctgctggagtgtag

SEQ ID NO: 5283 - DNA, 20 bp, Homo sapiens
gttaaggctgcagtgagctg

SEQ ID NO: 5284 - DNA, 20 bp, Homo sapiens
ggcttgtgcctagaaggtta

SEQ ID NO: 5285 - DNA, 20 bp, Homo sapiens
cactgcagccttaaccttct

SEQ ID NO: 5286 - DNA, 20 bp, Homo sapiens
gaggatggcttgtgcctaga

SEQ ID NO: 5287 - DNA, 20 bp, Homo sapiens
aggagggtgaggtaggagga

SEQ ID NO: 5288 - DNA, 20 bp, Homo sapiens
actcaggagggtgaggtagg

SEQ ID NO: 5289 - DNA, 20 bp, Homo sapiens
gctactcaggagggtgaggt

SEQ ID NO: 5290 - DNA, 20 bp, Homo sapiens
cccagctactcaggagggtg

SEQ ID NO: 5291 - DNA, 20 bp, Homo sapiens
gtagtcccagctactcagga

SEQ ID NO: 5292 - DNA, 20 bp, Homo sapiens
tgtagtcccagctactcagg

SEQ ID NO: 5293 - DNA, 20 bp, Homo sapiens
gcctgtagtcccagctactc

SEQ ID NO: 5294 - DNA, 20 bp, Homo sapiens
acctcaccctcctgagtagc

SEQ ID NO: 5295 - DNA, 20 bp, Homo sapiens
cctcaccctcctgagtagct

SEQ ID NO: 5296 - DNA, 20 bp, Homo sapiens
tcctgagtagctgggactac

SEQ ID NO: 5297 - DNA, 20 bp, Homo sapiens
acaaaattacttgggcgtgg

SEQ ID NO: 5298 - DNA, 20 bp, Homo sapiens
aatacaaaattacttgggcg

SEQ ID NO: 5299 - DNA, 20 bp, Homo sapiens
caaaaaatacaaaattactt

SEQ ID NO: 5300 - DNA, 20 bp, Homo sapiens
acaaaaaatacaaaattact

SEQ ID NO: 5301 - DNA, 20 bp, Homo sapiens
ttgtattttttgtagagaca

SEQ ID NO: 5302 - DNA, 20 bp, Homo sapiens
aaggtcttgctatgttgcct

SEQ ID NO: 5303 - DNA, 20 bp, Homo sapiens
tcttgctatgttgcctaggc

SEQ ID NO: 5304 - DNA, 20 bp, Homo sapiens
gaggagttcaagaccagcct

SEQ ID NO: 5305 - DNA, 20 bp, Homo sapiens
agggaggattgcttgagctg

SEQ ID NO: 5306 - DNA, 20 bp, Homo sapiens
ctttgggaggccaaggaggg

SEQ ID NO: 5307 - DNA, 20 bp, Homo sapiens
ctcaagcaatcctccctcct

SEQ ID NO: 5308 - DNA, 20 bp, Homo sapiens
gcactttgggaggccaagga

SEQ ID NO: 5309 - DNA, 20 bp, Homo sapiens
agcactttgggaggccaagg

SEQ ID NO: 5310 - DNA, 20 bp, Homo sapiens
cccagcactttgggaggcca

SEQ ID NO: 5311 - DNA, 20 bp, Homo sapiens
cacaatcccagcactttggg

SEQ ID NO: 5312 - DNA, 20 bp, Homo sapiens
cagcacaatcccagcacttt

SEQ ID NO: 5313 - DNA, 20 bp, Homo sapiens
tccttggcctcccaaagtgc

SEQ ID NO: 5314 - DNA, 20 bp, Homo sapiens
ccagcacaatcccagcactt

SEQ ID NO: 5315 - DNA, 20 bp, Homo sapiens
ccttggcctcccaaagtgct

SEQ ID NO: 5316 - DNA, 20 bp, Homo sapiens
ccaaagtgctgggattgtgc

SEQ ID NO: 5317 - DNA, 20 bp, Homo sapiens
caaagtgctgggattgtgct

SEQ ID NO: 5318 - DNA, 20 bp, Homo sapiens
tgggattgtgctgggattac

SEQ ID NO: 5319 - DNA, 20 bp, Homo sapiens
ggaagtcagaccaggtatgg

SEQ ID NO: 5320 - DNA, 20 bp, Homo sapiens
caggtgtgagccaccatacc

SEQ ID NO: 5321 - DNA, 20 bp, Homo sapiens
ttaggaagtcagaccaggta

SEQ ID NO: 5322 - DNA, 20 bp, Homo sapiens
aaagattaggaagtcagacc

SEQ ID NO: 5323 - DNA, 20 bp, Homo sapiens
gagttggggccctaaagatt

SEQ ID NO: 5324 - DNA, 20 bp, Homo sapiens
ggtctgacttcctaatcttt

SEQ ID NO: 5325 - DNA, 20 bp, Homo sapiens
gtctgacttcctaatcttta

SEQ ID NO: 5326 - DNA, 20 bp, Homo sapiens
cctggataagggcagagttg

SEQ ID NO: 5327 - DNA, 20 bp, Homo sapiens
gcctggataagggcagagtt

SEQ ID NO: 5328 - DNA, 20 bp, Homo sapiens
tgcctggataagggcagagt

SEQ ID NO: 5329 - DNA, 20 bp, Homo sapiens
ccccaactctgcccttatcc

SEQ ID NO: 5330 - DNA, 20 bp, Homo sapiens
gaggagagttgcctggataa

SEQ ID NO: 5331 - DNA, 20 bp, Homo sapiens
agaggagagttgcctggata

SEQ ID NO: 5332 - DNA, 20 bp, Homo sapiens
atggggagaggagagttgcc

SEQ ID NO: 5333 - DNA, 20 bp, Homo sapiens
agttagtggaagatggggag

SEQ ID NO: 5334 - DNA, 20 bp, Homo sapiens
aaagaagttagtggaagatg

SEQ ID NO: 5335 - DNA, 20 bp, Homo sapiens
caaagaagttagtggaagat

SEQ ID NO: 5336 - DNA, 20 bp, Homo sapiens
ccaaagaagttagtggaaga

SEQ ID NO: 5337 - DNA, 20 bp, Homo sapiens
gaatattccaaagaagttag

SEQ ID NO: 5338 - DNA, 20 bp, Homo sapiens
ccatcttccactaacttctt

SEQ ID NO: 5339 - DNA, 20 bp, Homo sapiens
ctctaaggcttttacagctc

SEQ ID NO: 5340 - DNA, 20 bp, Homo sapiens
gttggacttgatactctcta

SEQ ID NO: 5341 - DNA, 20 bp, Homo sapiens
tgtctgtaacacataggagt

SEQ ID NO: 5342 - DNA, 20 bp, Homo sapiens
tttccctgtctgtaacacat

SEQ ID NO: 5343 - DNA, 20 bp, Homo sapiens
aactcctatgtgttacagac

SEQ ID NO: 5344 - DNA, 20 bp, Homo sapiens
actcctatgtgttacagaca

SEQ ID NO: 5345 - DNA, 20 bp, Homo sapiens
tgttacagacagggaaactg

SEQ ID NO: 5346 - DNA, 20 bp, Homo sapiens
agggaaactgaggcctaaag

SEQ ID NO: 5347 - DNA, 20 bp, Homo sapiens
gggaaactgaggcctaaaga

SEQ ID NO: 5348 - DNA, 20 bp, Homo sapiens
gcaagtccattaccctcttt

SEQ ID NO: 5349 - DNA, 20 bp, Homo sapiens
ctgaggcctaaagagggtaa

SEQ ID NO: 5350 - DNA, 20 bp, Homo sapiens
tcacctcactaagtgatctt

SEQ ID NO: 5351 - DNA, 20 bp, Homo sapiens
ttgcctaagatcacttagtg

SEQ ID NO: 5352 - DNA, 20 bp, Homo sapiens
actatgtccttgcacaggct

SEQ ID NO: 5353 - DNA, 20 bp, Homo sapiens
gagacagcctagcctgtgca

SEQ ID NO: 5354 - DNA, 20 bp, Homo sapiens
ctggaactatgtccttgcac

SEQ ID NO: 5355 - DNA, 20 bp, Homo sapiens
ctgtgcaaggacatagttcc

SEQ ID NO: 5356 - DNA, 20 bp, Homo sapiens
agagcccagctctgaatgcc

SEQ ID NO: 5357 - DNA, 20 bp, Homo sapiens
tagttccaggcattcagagc

SEQ ID NO: 5358 - DNA, 20 bp, Homo sapiens
agttccaggcattcagagct

SEQ ID NO: 5359 - DNA, 20 bp, Homo sapiens
tcagagctgggctctgctgc

SEQ ID NO: 5360 - DNA, 20 bp, Homo sapiens
ctaccaggccccaaacatgc

SEQ ID NO: 5361 - DNA, 20 bp, Homo sapiens
ggctctgctgccggcatgtt

SEQ ID NO: 5362 - DNA, 20 bp, Homo sapiens
gctctgctgccggcatgttt

SEQ ID NO: 5363 - DNA, 20 bp, Homo sapiens
ctctgctgccggcatgtttg

SEQ ID NO: 5364 - DNA, 20 bp, Homo sapiens
ctgccggcatgtttggggcc

SEQ ID NO: 5365 - DNA, 20 bp, Homo sapiens
tcagcagtgaactaactacc

SEQ ID NO: 5366 - DNA, 20 bp, Homo sapiens
tagttcactgctgaactacc

SEQ ID NO: 5367 - DNA, 20 bp, Homo sapiens
tggagaaagaaaatctaacc

SEQ ID NO: 5368 - DNA, 20 bp, Homo sapiens
gattttctttctccaagttg

SEQ ID NO: 5369 - DNA, 20 bp, Homo sapiens
tttatgaaagctccacaact

SEQ ID NO: 5370 - DNA, 20 bp, Homo sapiens
ctttcataaacttttcctga

SEQ ID NO: 5371 - DNA, 20 bp, Homo sapiens
acattgtaaggaagaccttc

SEQ ID NO: 5372 - DNA, 20 bp, Homo sapiens
gaggagaattgtacattgta

SEQ ID NO: 5373 - DNA, 20 bp, Homo sapiens
tacaatgtacaattctcctc

SEQ ID NO: 5374 - DNA, 20 bp, Homo sapiens
acaatgtacaattctcctct

SEQ ID NO: 5375 - DNA, 20 bp, Homo sapiens
gcgctcatgaccgggcccag

SEQ ID NO: 5376 - DNA, 20 bp, Homo sapiens
gtacaattctcctctgggcc

SEQ ID NO: 5377 - DNA, 20 bp, Homo sapiens
tgtgaggggcgctcatgacc

SEQ ID NO: 5378 - DNA, 20 bp, Homo sapiens
ctgtgaggggcgctcatgac

SEQ ID NO: 5379 - DNA, 20 bp, Homo sapiens
cggtcatgagcgcccctcac

SEQ ID NO: 5380 - DNA, 20 bp, Homo sapiens
gaccagagagagcctgtgag

SEQ ID NO: 5381 - DNA, 20 bp, Homo sapiens
ggaccagagagagcctgtga

SEQ ID NO: 5382 - DNA, 20 bp, Homo sapiens
gggaccagagagagcctgtg

SEQ ID NO: 5383 - DNA, 20 bp, Homo sapiens
cgcccctcacaggctctctc

SEQ ID NO: 5384 - DNA, 20 bp, Homo sapiens
ttcctctcattttacagaag

SEQ ID NO: 5385 - DNA, 20 bp, Homo sapiens
tttcctctcattttacagaa

SEQ ID NO: 5386 - DNA, 20 bp, Homo sapiens
ttttcctctcattttacaga

SEQ ID NO: 5387 - DNA, 20 bp, Homo sapiens
gtccccttctgtaaaatgag

SEQ ID NO: 5388 - DNA, 20 bp, Homo sapiens
tctgtaaaatgagaggaaaa

SEQ ID NO: 5389 - DNA, 20 bp, Homo sapiens
tggaagaattgctctactca

SEQ ID NO: 5390 - DNA, 20 bp, Homo sapiens
catggaatcttcaataagtc

SEQ ID NO: 5391 - DNA, 20 bp, Homo sapiens
atggaatcttcaataagtct

SEQ ID NO: 5392 - DNA, 20 bp, Homo sapiens
gtagcaatgctatatgcata

SEQ ID NO: 5393 - DNA, 20 bp, Homo sapiens
tgtagcaatgctatatgcat

SEQ ID NO: 5394 - DNA, 20 bp, Homo sapiens
catatagcattgctacaaaa

SEQ ID NO: 5395 - DNA, 20 bp, Homo sapiens
taacaatcgtgtttaataaa

SEQ ID NO: 5396 - DNA, 20 bp, Homo sapiens
aatcgtgtttaataaaaggt

SEQ ID NO: 5397 - DNA, 20 bp, Homo sapiens
ttggatttgcatatctgaag

SEQ ID NO: 5398 - DNA, 20 bp, Homo sapiens
tggatttgcatatctgaagt

SEQ ID NO: 5399 - DNA, 20 bp, Homo sapiens
ggatttgcatatctgaagtg

SEQ ID NO: 5400 - DNA, 20 bp, Homo sapiens
cagtgaggcttgtgttcagt

SEQ ID NO: 5401 - DNA, 20 bp, Homo sapiens
gtgcacatgcgggagcagtg

SEQ ID NO: 5402 - DNA, 20 bp, Homo sapiens
tgaaggtgcagtgcacatgc

SEQ ID NO: 5403 - DNA, 20 bp, Homo sapiens
atgaaggtgcagtgcacatg

SEQ ID NO: 5404 - DNA, 20 bp, Homo sapiens
agcaggaaatatgtatatga

SEQ ID NO: 5405 - DNA, 20 bp, Homo sapiens
tcatatacatatttcctgct

SEQ ID NO: 5406 - DNA, 20 bp, Homo sapiens
aattccctcaggagccaagc

SEQ ID NO: 5407 - DNA, 20 bp, Homo sapiens
tatttcctgcttggctcctg

SEQ ID NO: 5408 - DNA, 20 bp, Homo sapiens
atttcctgcttggctcctga

SEQ ID NO: 5409 - DNA, 20 bp, Homo sapiens
gggattactcaaattccctc

SEQ ID NO: 5410 - DNA, 20 bp, Homo sapiens
ggaatttgagtaatcccaag

SEQ ID NO: 5411 - DNA, 20 bp, Homo sapiens
tttctacaggggttcctctt

SEQ ID NO: 5412 - DNA, 20 bp, Homo sapiens
ttttctacaggggttcctct

SEQ ID NO: 5413 - DNA, 20 bp, Homo sapiens
ccaggggacattttctacag

SEQ ID NO: 5414 - DNA, 20 bp, Homo sapiens
gccaggggacattttctaca

SEQ ID NO: 5415 - DNA, 20 bp, Homo sapiens
ggccaggggacattttctac

SEQ ID NO: 5416 - DNA, 20 bp, Homo sapiens
cccctgtagaaaatgtcccc

SEQ ID NO: 5417 - DNA, 20 bp, Homo sapiens
gaatgggggtgtgtggccag

SEQ ID NO: 5418 - DNA, 20 bp, Homo sapiens
ggaatgggggtgtgtggcca

SEQ ID NO: 5419 - DNA, 20 bp, Homo sapiens
aggaatgggggtgtgtggcc

SEQ ID NO: 5420 - DNA, 20 bp, Homo sapiens
tccttaggaatgggggtgtg

SEQ ID NO: 5421 - DNA, 20 bp, Homo sapiens
gcttgcatccttaggaatgg

SEQ ID NO: 5422 - DNA, 20 bp, Homo sapiens
tgcttgcatccttaggaatg

SEQ ID NO: 5423 - DNA, 20 bp, Homo sapiens
ctgcttgcatccttaggaat

SEQ ID NO: 5424 - DNA, 20 bp, Homo sapiens
gccacacacccccattccta

SEQ ID NO: 5425 - DNA, 20 bp, Homo sapiens
cctgcttgcatccttaggaa

SEQ ID NO: 5426 - DNA, 20 bp, Homo sapiens
tatctcctgcttgcatcctt

SEQ ID NO: 5427 - DNA, 20 bp, Homo sapiens
ccattcctaaggatgcaagc

SEQ ID NO: 5428 - DNA, 20 bp, Homo sapiens
acaacaaggagggaggtgca

SEQ ID NO: 5429 - DNA, 20 bp, Homo sapiens
gacaacaaggagggaggtgc

SEQ ID NO: 5430 - DNA, 20 bp, Homo sapiens
tcttctgacaacaaggaggg

SEQ ID NO: 5431 - DNA, 20 bp, Homo sapiens
acttcttctgacaacaagga

SEQ ID NO: 5432 - DNA, 20 bp, Homo sapiens
cacttcttctgacaacaagg

SEQ ID NO: 5433 - DNA, 20 bp, Homo sapiens
ttgcacttcttctgacaaca

SEQ ID NO: 5434 - DNA, 20 bp, Homo sapiens
gtgagaagtgggcattagga

SEQ ID NO: 5435 - DNA, 20 bp, Homo sapiens
gtgggtgagaagtgggcatt

SEQ ID NO: 5436 - DNA, 20 bp, Homo sapiens
ttggggcgtgggtgagaagt

SEQ ID NO: 5437 - DNA, 20 bp, Homo sapiens
tttggggcgtgggtgagaag

SEQ ID NO: 5438 - DNA, 20 bp, Homo sapiens
gacctggggatttggggcgt

SEQ ID NO: 5439 - DNA, 20 bp, Homo sapiens
ggacctggggatttggggcg

SEQ ID NO: 5440 - DNA, 20 bp, Homo sapiens
ccatgggacctggggatttg

SEQ ID NO: 5441 - DNA, 20 bp, Homo sapiens
tccatgggacctggggattt

SEQ ID NO: 5442 - DNA, 20 bp, Homo sapiens
ctccatgggacctggggatt

SEQ ID NO: 5443 - DNA, 20 bp, Homo sapiens
cacccacgccccaaatcccc

SEQ ID NO: 5444 - DNA, 20 bp, Homo sapiens
aaggacctccatgggacctg

SEQ ID NO: 5445 - DNA, 20 bp, Homo sapiens
caaggacctccatgggacct

SEQ ID NO: 5446 - DNA, 20 bp, Homo sapiens
ccaaggacctccatgggacc

SEQ ID NO: 5447 - DNA, 20 bp, Homo sapiens
ccccaaatccccaggtccca

SEQ ID NO: 5448 - DNA, 20 bp, Homo sapiens
caaatccccaggtcccatgg

SEQ ID NO: 5449 - DNA, 20 bp, Homo sapiens
aggcccccaaggacctccat

SEQ ID NO: 5450 - DNA, 20 bp, Homo sapiens
gaggcccccaaggacctcca

SEQ ID NO: 5451 - DNA, 20 bp, Homo sapiens
ccaggtcccatggaggtcct

SEQ ID NO: 5452 - DNA, 20 bp, Homo sapiens
caggtcccatggaggtcctt

SEQ ID NO: 5453 - DNA, 20 bp, Homo sapiens
aggtcccatggaggtccttg

SEQ ID NO: 5454 - DNA, 20 bp, Homo sapiens
ggtcccatggaggtccttgg

SEQ ID NO: 5455 - DNA, 20 bp, Homo sapiens
caggatataggaggccccca

SEQ ID NO: 5456 - DNA, 20 bp, Homo sapiens
tgacaccaccaggatatagg

SEQ ID NO: 5457 - DNA, 20 bp, Homo sapiens
cttgggggcctcctatatcc

SEQ ID NO: 5458 - DNA, 20 bp, Homo sapiens
acctgacaccaccaggatat

SEQ ID NO: 5459 - DNA, 20 bp, Homo sapiens
gggggcctcctatatcctgg

SEQ ID NO: 5460 - DNA, 20 bp, Homo sapiens
caaatcaacctgacaccacc

SEQ ID NO: 5461 - DNA, 20 bp, Homo sapiens
tcctatatcctggtggtgtc

SEQ ID NO: 5462 - DNA, 20 bp, Homo sapiens
ctggtggtgtcaggttgatt

SEQ ID NO: 5463 - DNA, 20 bp, Homo sapiens
tctgccagagaggacaaggg

SEQ ID NO: 5464 - DNA, 20 bp, Homo sapiens
gggtctgccagagaggacaa

SEQ ID NO: 5465 - DNA, 20 bp, Homo sapiens
agggtctgccagagaggaca

SEQ ID NO: 5466 - DNA, 20 bp, Homo sapiens
gtgtcctcccttgtcctctc

SEQ ID NO: 5467 - DNA, 20 bp, Homo sapiens
atacccagggtctgccagag

SEQ ID NO: 5468 - DNA, 20 bp, Homo sapiens
ttgtcctctctggcagaccc

SEQ ID NO: 5469 - DNA, 20 bp, Homo sapiens
tgtcctctctggcagaccct

SEQ ID NO: 5470 - DNA, 20 bp, Homo sapiens
ttgaaacatacacataccca

SEQ ID NO: 5471 - DNA, 20 bp, Homo sapiens
attgaaacatacacataccc

SEQ ID NO: 5472 - DNA, 20 bp, Homo sapiens
tgggtatgtgtatgtttcaa

SEQ ID NO: 5473 - DNA, 20 bp, Homo sapiens
aaagactttttctgagactt

SEQ ID NO: 5474 - DNA, 20 bp, Homo sapiens
caatgagaagctctcattac

SEQ ID NO: 5475 - DNA, 20 bp, Homo sapiens
agagcttctcattgttatca

SEQ ID NO: 5476 - DNA, 20 bp, Homo sapiens
ttctcattgttatcaaggcc

SEQ ID NO: 5477 - DNA, 20 bp, Homo sapiens
tctcattgttatcaaggcca

SEQ ID NO: 5478 - DNA, 20 bp, Homo sapiens
attgttatcaaggccagggc

SEQ ID NO: 5479 - DNA, 20 bp, Homo sapiens
ctgccactggtctccagccc

SEQ ID NO: 5480 - DNA, 20 bp, Homo sapiens
aggccagggctggagaccag

SEQ ID NO: 5481 - DNA, 20 bp, Homo sapiens
cagggctggagaccagtggc

SEQ ID NO: 5482 - DNA, 20 bp, Homo sapiens
aataggaactcacctgccac

SEQ ID NO: 5483 - DNA, 20 bp, Homo sapiens
atcatgacaatcacagcaat

SEQ ID NO: 5484 - DNA, 20 bp, Homo sapiens
ttagtacagtgactggcaca

SEQ ID NO: 5485 - DNA, 20 bp, Homo sapiens
ataatgtttagtacagtgac

SEQ ID NO: 5486 - DNA, 20 bp, Homo sapiens
gtactaaacattatttcctt

SEQ ID NO: 5487 - DNA, 20 bp, Homo sapiens
gaggtttctgggaaatccaa

SEQ ID NO: 5488 - DNA, 20 bp, Homo sapiens
gacccacctgagaggtttct

SEQ ID NO: 5489 - DNA, 20 bp, Homo sapiens
agacccacctgagaggtttc

SEQ ID NO: 5490 - DNA, 20 bp, Homo sapiens
ggatttcccagaaacctctc

SEQ ID NO: 5491 - DNA, 20 bp, Homo sapiens
tttcccagaaacctctcagg

SEQ ID NO: 5492 - DNA, 20 bp, Homo sapiens
ggtaattagacccacctgag

SEQ ID NO: 5493 - DNA, 20 bp, Homo sapiens
ttcccagaaacctctcaggt

SEQ ID NO: 5494 - DNA, 20 bp, Homo sapiens
tttccttatcagctgaataa

SEQ ID NO: 5495 - DNA, 20 bp, Homo sapiens
ctttccttatcagctgaata

SEQ ID NO: 5496 - DNA, 20 bp, Homo sapiens
ttacccttattcagctgata

SEQ ID NO: 5497 - DNA, 20 bp, Homo sapiens
taagcaacttacaagaccac

SEQ ID NO: 5498 - DNA, 20 bp, Homo sapiens
aagcaacttacaagaccaca

SEQ ID NO: 5499 - DNA, 20 bp, Homo sapiens
gtttccacttcatagccctg

SEQ ID NO: 5500 - DNA, 20 bp, Homo sapiens
aagaccacagggctatgaag

SEQ ID NO: 5501 - DNA, 20 bp, Homo sapiens
agagtctcactgtgtcgccc

SEQ ID NO: 5502 - DNA, 20 bp, Homo sapiens
tctcactgtgtcgcccaggc

SEQ ID NO: 5503 - DNA, 20 bp, Homo sapiens
gcaccactgcactccagcct

SEQ ID NO: 5504 - DNA, 20 bp, Homo sapiens
cgcaccactgcactccagcc

SEQ ID NO: 5505 - DNA, 20 bp, Homo sapiens
tcgcccaggctggagtgcag

SEQ ID NO: 5506 - DNA, 20 bp, Homo sapiens
caggctggagtgcagtggtg

SEQ ID NO: 5507 - DNA, 20 bp, Homo sapiens
cgcttgaacccgggaggcag

SEQ ID NO: 5508 - DNA, 20 bp, Homo sapiens
tcactgcaacctctgcctcc

SEQ ID NO: 5509 - DNA, 20 bp, Homo sapiens
cactgcaacctctgcctccc

SEQ ID NO: 5510 - DNA, 20 bp, Homo sapiens
gagaatcgcttgaacccggg

SEQ ID NO: 5511 - DNA, 20 bp, Homo sapiens
caggagaatcgcttgaaccc

SEQ ID NO: 5512 - DNA, 20 bp, Homo sapiens
gcaggagaatcgcttgaacc

SEQ ID NO: 5513 - DNA, 20 bp, Homo sapiens
cagctactcgggaggcaggc

SEQ ID NO: 5514 - DNA, 20 bp, Homo sapiens
atcccagctactcgggaggc

SEQ ID NO: 5515 - DNA, 20 bp, Homo sapiens
tgtaatcccagctactcggg

SEQ ID NO: 5516 - DNA, 20 bp, Homo sapiens
acctgtaatcccagctactc

SEQ ID NO: 5517 - DNA, 20 bp, Homo sapiens
ctgcctgcctcccgagtagc

SEQ ID NO: 5518 - DNA, 20 bp, Homo sapiens
cacctgtaatcccagctact

SEQ ID NO: 5519 - DNA, 20 bp, Homo sapiens
tgcctgcctcccgagtagct

SEQ ID NO: 5520 - DNA, 20 bp, Homo sapiens
tcccgagtagctgggattac

SEQ ID NO: 5521 - DNA, 20 bp, Homo sapiens
ttttgtaattttagtagaga

SEQ ID NO: 5522 - DNA, 20 bp, Homo sapiens
tttgtaattttagtagagac

SEQ ID NO: 5523 - DNA, 20 bp, Homo sapiens
ttgtaattttagtagagacg

SEQ ID NO: 5524 - DNA, 20 bp, Homo sapiens
gagacggggtttcaccatgt

SEQ ID NO: 5525 - DNA, 20 bp, Homo sapiens
cgagactagcctggccaaca

SEQ ID NO: 5526 - DNA, 20 bp, Homo sapiens
ggggtttcaccatgttggcc

SEQ ID NO: 5527 - DNA, 20 bp, Homo sapiens
tcagcagttcgagactagcc

SEQ ID NO: 5528 - DNA, 20 bp, Homo sapiens
ccaatttaggaggatgaggt

SEQ ID NO: 5529 - DNA, 20 bp, Homo sapiens
accaatttaggaggatgagg

SEQ ID NO: 5530 - DNA, 20 bp, Homo sapiens
gataccaatttaggaggatg

SEQ ID NO: 5531 - DNA, 20 bp, Homo sapiens
tataaagataccaatttagg

SEQ ID NO: 5532 - DNA, 20 bp, Homo sapiens
cccacctcatcctcctaaat

SEQ ID NO: 5533 - DNA, 20 bp, Homo sapiens
acatataaagataccaattt

SEQ ID NO: 5534 - DNA, 20 bp, Homo sapiens
ttgccaccagttgactcttt

SEQ ID NO: 5535 - DNA, 20 bp, Homo sapiens
atatgtccaaaagagtcaac

SEQ ID NO: 5536 - DNA, 20 bp, Homo sapiens
tgtccaaaagagtcaactgg

SEQ ID NO: 5537 - DNA, 20 bp, Homo sapiens
caactggtggcaatttagtg

SEQ ID NO: 5538 - DNA, 20 bp, Homo sapiens
ttagtgaggtttaatctaat

SEQ ID NO: 5539 - DNA, 20 bp, Homo sapiens
ctaataggaaatgatagagc

SEQ ID NO: 5540 - DNA, 20 bp, Homo sapiens
taataggaaatgatagagct

SEQ ID NO: 5541 - DNA, 20 bp, Homo sapiens
gcataggttttgagttcaca

SEQ ID NO: 5542 - DNA, 20 bp, Homo sapiens
aaaggtggaaggggaagcat

SEQ ID NO: 5543 - DNA, 20 bp, Homo sapiens
gtttttcaaaaaggtggaag

SEQ ID NO: 5544 - DNA, 20 bp, Homo sapiens
tgtttttcaaaaaggtggaa

SEQ ID NO: 5545 - DNA, 20 bp, Homo sapiens
atgtttttcaaaaaggtgga

SEQ ID NO: 5546 - DNA, 20 bp, Homo sapiens
gacaatgtttttcaaaaagg

SEQ ID NO: 5547 - DNA, 20 bp, Homo sapiens
ctagacaatgtttttcaaaa

SEQ ID NO: 5548 - DNA, 20 bp, Homo sapiens
ctttttgaaaaacattgtct

SEQ ID NO: 5549 - DNA, 20 bp, Homo sapiens
ttgaaaaacattgtctaggc

SEQ ID NO: 5550 - DNA, 20 bp, Homo sapiens
tgaaaaacattgtctaggct

SEQ ID NO: 5551 - DNA, 20 bp, Homo sapiens
attgtctaggctgggcacga

SEQ ID NO: 5552 - DNA, 20 bp, Homo sapiens
tcccaaagtgctgggattac

SEQ ID NO: 5553 - DNA, 20 bp, Homo sapiens
cctccgtctcccaaagtgct

SEQ ID NO: 5554 - DNA, 20 bp, Homo sapiens
tgcctgtaatcccagcactt

SEQ ID NO: 5555 - DNA, 20 bp, Homo sapiens
acctccgtctcccaaagtgc

SEQ ID NO: 5556 - DNA, 20 bp, Homo sapiens
gcctgtaatcccagcacttt

SEQ ID NO: 5557 - DNA, 20 bp, Homo sapiens
aatcccagcactttgggaga

SEQ ID NO: 5558 - DNA, 20 bp, Homo sapiens
cccagcactttgggagacgg

SEQ ID NO: 5559 - DNA, 20 bp, Homo sapiens
agcactttgggagacggagg

SEQ ID NO: 5560 - DNA, 20 bp, Homo sapiens
gcactttgggagacggaggt

SEQ ID NO: 5561 - DNA, 20 bp, Homo sapiens
ctttgggagacggaggtggg

SEQ ID NO: 5562 - DNA, 20 bp, Homo sapiens
ggaggtgggtggattacatg

SEQ ID NO: 5563 - DNA, 20 bp, Homo sapiens
tgggtggattacatgaggtc

SEQ ID NO: 5564 - DNA, 20 bp, Homo sapiens
tcaggagttcgagaccagct

SEQ ID NO: 5565 - DNA, 20 bp, Homo sapiens
tggctaatttttggccaagc

SEQ ID NO: 5566 - DNA, 20 bp, Homo sapiens
caccacgcctggctaatttt

SEQ ID NO: 5567 - DNA, 20 bp, Homo sapiens
agcttggccaaaaattagcc

SEQ ID NO: 5568 - DNA, 20 bp, Homo sapiens
ggccaaaaattagccaggcg

SEQ ID NO: 5569 - DNA, 20 bp, Homo sapiens
caggcgcgcgccaccacgcc

SEQ ID NO: 5570 - DNA, 20 bp, Homo sapiens
caaaaattagccaggcgtgg

SEQ ID NO: 5571 - DNA, 20 bp, Homo sapiens
ggcgtggtggcgcgcgcctg

SEQ ID NO: 5572 - DNA, 20 bp, Homo sapiens
tgtgcttcagtgggaaccac

SEQ ID NO: 5573 - DNA, 20 bp, Homo sapiens
tcagcctcctgtgcttcagt

SEQ ID NO: 5574 - DNA, 20 bp, Homo sapiens
ttcagcctcctgtgcttcag

SEQ ID NO: 5575 - DNA, 20 bp, Homo sapiens
tgtggttcccactgaagcac

SEQ ID NO: 5576 - DNA, 20 bp, Homo sapiens
ggttcccactgaagcacagg

SEQ ID NO: 5577 - DNA, 20 bp, Homo sapiens
gcacaagaatcacttgaacc

SEQ ID NO: 5578 - DNA, 20 bp, Homo sapiens
cacaagaatcacttgaaccc

SEQ ID NO: 5579 - DNA, 20 bp, Homo sapiens
aagaatcacttgaacccggg

SEQ ID NO: 5580 - DNA, 20 bp, Homo sapiens
aatcacttgaacccgggagg

SEQ ID NO: 5581 - DNA, 20 bp, Homo sapiens
cgctgcaacctccacctccc

SEQ ID NO: 5582 - DNA, 20 bp, Homo sapiens
tcgctgcaacctccacctcc

SEQ ID NO: 5583 - DNA, 20 bp, Homo sapiens
cacttgaacccgggaggtgg

SEQ ID NO: 5584 - DNA, 20 bp, Homo sapiens
ggagtgcagtggtgcgatct

SEQ ID NO: 5585 - DNA, 20 bp, Homo sapiens
ttgcccaggttggagtgcag

SEQ ID NO: 5586 - DNA, 20 bp, Homo sapiens
cgcaccactgcactccaacc

SEQ ID NO: 5587 - DNA, 20 bp, Homo sapiens
gcaccactgcactccaacct

SEQ ID NO: 5588 - DNA, 20 bp, Homo sapiens
agtctctctgttgcccaggt

SEQ ID NO: 5589 - DNA, 20 bp, Homo sapiens
acagagtctctctgttgccc

SEQ ID NO: 5590 - DNA, 20 bp, Homo sapiens
aaaaaaaattgtctacatgc

SEQ ID NO: 5591 - DNA, 20 bp, Homo sapiens
atattgtctctaagtttggg

SEQ ID NO: 5592 - DNA, 20 bp, Homo sapiens
ttaatattgtctctaagttt

SEQ ID NO: 5593 - DNA, 20 bp, Homo sapiens
attaatattgtctctaagtt

SEQ ID NO: 5594 - DNA, 20 bp, Homo sapiens
cttagagacaatattaatga

SEQ ID NO: 5595 - DNA, 20 bp, Homo sapiens
ttcgcacatgaataaatgac

SEQ ID NO: 5596 - DNA, 20 bp, Homo sapiens
tattcatgtgcgaaaacagt

SEQ ID NO: 5597 - DNA, 20 bp, Homo sapiens
ataaaatagcttttagagtt

SEQ ID NO: 5598 - DNA, 20 bp, Homo sapiens
attaggttgccagaatcaaa

SEQ ID NO: 5599 - DNA, 20 bp, Homo sapiens
ttacatataccatttgattc

SEQ ID NO: 5600 - DNA, 20 bp, Homo sapiens
tgattctggcaacctaatga

SEQ ID NO: 5601 - DNA, 20 bp, Homo sapiens
aatgatcatactccttcatt

SEQ ID NO: 5602 - DNA, 20 bp, Homo sapiens
tgttcttgtctgttaaatag

SEQ ID NO: 5603 - DNA, 20 bp, Homo sapiens
ttgttcttgtctgttaaata

SEQ ID NO: 5604 - DNA, 20 bp, Homo sapiens
cttgttcttgtctgttaaat

SEQ ID NO: 5605 - DNA, 20 bp, Homo sapiens
taacagacaagaacaagaag

SEQ ID NO: 5606 - DNA, 20 bp, Homo sapiens
aacagacaagaacaagaaga

SEQ ID NO: 5607 - DNA, 20 bp, Homo sapiens
agacaagaacaagaagaggg

SEQ ID NO: 5608 - DNA, 20 bp, Homo sapiens
gacaagaacaagaagaggga

SEQ ID NO: 5609 - DNA, 20 bp, Homo sapiens
acaagaagagggagggcaga

SEQ ID NO: 5610 - DNA, 20 bp, Homo sapiens
aagagggagggcagatggtg

SEQ ID NO: 5611 - DNA, 20 bp, Homo sapiens
gcagatggtgtggtagtcta

SEQ ID NO: 5612 - DNA, 20 bp, Homo sapiens
ggtgtggtagtctaaggcac

SEQ ID NO: 5613 - DNA, 20 bp, Homo sapiens
tttacacctagataatctgc

SEQ ID NO: 5614 - DNA, 20 bp, Homo sapiens
caggctccagcagattatct

SEQ ID NO: 5615 - DNA, 20 bp, Homo sapiens
gattatctaggtgtaaatct

SEQ ID NO: 5616 - DNA, 20 bp, Homo sapiens
taggtgtaaatcttggctgt

SEQ ID NO: 5617 - DNA, 20 bp, Homo sapiens
gtaaatcttggctgtaggcc

SEQ ID NO: 5618 - DNA, 20 bp, Homo sapiens
cagacatgagccacagggcc

SEQ ID NO: 5619 - DNA, 20 bp, Homo sapiens
tggctgtaggccaggccctg

SEQ ID NO: 5620 - DNA, 20 bp, Homo sapiens
gattacagacatgagccaca

SEQ ID NO: 5621 - DNA, 20 bp, Homo sapiens
ggattacagacatgagccac

SEQ ID NO: 5622 - DNA, 20 bp, Homo sapiens
cctcggtttcccaaagtgat

SEQ ID NO: 5623 - DNA, 20 bp, Homo sapiens
tgtctgtaatcccatcactt

SEQ ID NO: 5624 - DNA, 20 bp, Homo sapiens
acctcggtttcccaaagtga

SEQ ID NO: 5625 - DNA, 20 bp, Homo sapiens
gtctgtaatcccatcacttt

SEQ ID NO: 5626 - DNA, 20 bp, Homo sapiens
cccatcactttgggaaaccg

SEQ ID NO: 5627 - DNA, 20 bp, Homo sapiens
atcactttgggaaaccgagg

SEQ ID NO: 5628 - DNA, 20 bp, Homo sapiens
tcactttgggaaaccgaggt

SEQ ID NO: 5629 - DNA, 20 bp, Homo sapiens
ctcaagtgatctgcccacct

SEQ ID NO: 5630 - DNA, 20 bp, Homo sapiens
cgaggtgggcagatcacttg

SEQ ID NO: 5631 - DNA, 20 bp, Homo sapiens
tgggcagatcacttgaggtc

SEQ ID NO: 5632 - DNA, 20 bp, Homo sapiens
tcaggagttcgagaccagct

SEQ ID NO: 5633 - DNA, 20 bp, Homo sapiens
tttcgctatgttggccaagc

SEQ ID NO: 5634 - DNA, 20 bp, Homo sapiens
gagaaggggtttcgctatgt

SEQ ID NO: 5635 - DNA, 20 bp, Homo sapiens
ttgtatttttaatagagaag

SEQ ID NO: 5636 - DNA, 20 bp, Homo sapiens
tttgtatttttaatagagaa

SEQ ID NO: 5637 - DNA, 20 bp, Homo sapiens
ttttgtatttttaatagaga

SEQ ID NO: 5638 - DNA, 20 bp, Homo sapiens
ttaaaaatacaaaaattagc

SEQ ID NO: 5639 - DNA, 20 bp, Homo sapiens
taaaaatacaaaaattagcc

SEQ ID NO: 5640 - DNA, 20 bp, Homo sapiens
atacaaaaattagccgggca

SEQ ID NO: 5641 - DNA, 20 bp, Homo sapiens
caggtgcctgccaccgtgcc

SEQ ID NO: 5642 - DNA, 20 bp, Homo sapiens
caaaaattagccgggcacgg

SEQ ID NO: 5643 - DNA, 20 bp, Homo sapiens
aattagccgggcacggtggc

SEQ ID NO: 5644 - DNA, 20 bp, Homo sapiens
tcccaagtagctgggattac

SEQ ID NO: 5645 - DNA, 20 bp, Homo sapiens
cctcagcctcccaagtagct

SEQ ID NO: 5646 - DNA, 20 bp, Homo sapiens
cacctgtaatcccagctact

SEQ ID NO: 5647 - DNA, 20 bp, Homo sapiens
gcctcagcctcccaagtagc

SEQ ID NO: 5648 - DNA, 20 bp, Homo sapiens
acctgtaatcccagctactt

SEQ ID NO: 5649 - DNA, 20 bp, Homo sapiens
tgtaatcccagctacttggg

SEQ ID NO: 5650 - DNA, 20 bp, Homo sapiens
cccagctacttgggaggctg

SEQ ID NO: 5651 - DNA, 20 bp, Homo sapiens
gctacttgggaggctgaggc

SEQ ID NO: 5652 - DNA, 20 bp, Homo sapiens
caggagaatcacttgaaccc

SEQ ID NO: 5653 - DNA, 20 bp, Homo sapiens
gagaatcacttgaacccagg

SEQ ID NO: 5654 - DNA, 20 bp, Homo sapiens
cactgcaacctctgcctcct

SEQ ID NO: 5655 - DNA, 20 bp, Homo sapiens
tcactgcaacctctgcctcc

SEQ ID NO: 5656 - DNA, 20 bp, Homo sapiens
cacttgaacccaggaggcag

SEQ ID NO: 5657 - DNA, 20 bp, Homo sapiens
ggagtacagtggcaagatct

SEQ ID NO: 5658 - DNA, 20 bp, Homo sapiens
tcacccaggctggagtacag

SEQ ID NO: 5659 - DNA, 20 bp, Homo sapiens
cttgccactgtactccagcc

SEQ ID NO: 5660 - DNA, 20 bp, Homo sapiens
ttgccactgtactccagcct

SEQ ID NO: 5661 - DNA, 20 bp, Homo sapiens
gtttcactcgtcacccaggc

SEQ ID NO: 5662 - DNA, 20 bp, Homo sapiens
tagagtttcactcgtcaccc

SEQ ID NO: 5663 - DNA, 20 bp, Homo sapiens
aaaatcttagctctacccac

SEQ ID NO: 5664 - DNA, 20 bp, Homo sapiens
aaatcttagctctacccacc

SEQ ID NO: 5665 - DNA, 20 bp, Homo sapiens
aatcttagctctacccaccg

SEQ ID NO: 5666 - DNA, 20 bp, Homo sapiens
gttacgtaacttgccccggt

SEQ ID NO: 5667 - DNA, 20 bp, Homo sapiens
cgttacgtaacttgccccgg

SEQ ID NO: 5668 - DNA, 20 bp, Homo sapiens
aggcgttacgtaacttgccc

SEQ ID NO: 5669 - DNA, 20 bp, Homo sapiens
atatgaaaaccaaggcacag

SEQ ID NO: 5670 - DNA, 20 bp, Homo sapiens
tacgtaacgcctctgtgcct

SEQ ID NO: 5671 - DNA, 20 bp, Homo sapiens
ttttacagatatgaaaacca

SEQ ID NO: 5672 - DNA, 20 bp, Homo sapiens
tggttttcatatctgtaaaa

SEQ ID NO: 5673 - DNA, 20 bp, Homo sapiens
tcacaaccacactttgacgt

SEQ ID NO: 5674 - DNA, 20 bp, Homo sapiens
ctcacaaccacactttgacg

SEQ ID NO: 5675 - DNA, 20 bp, Homo sapiens
acagcacccacgtcaaagtg

SEQ ID NO: 5676 - DNA, 20 bp, Homo sapiens
taaagtgattaaaacagcgt

SEQ ID NO: 5677 - DNA, 20 bp, Homo sapiens
attaaaacagcgtaggcaca

SEQ ID NO: 5678 - DNA, 20 bp, Homo sapiens
taggcacatggtaaacgctt

SEQ ID NO: 5679 - DNA, 20 bp, Homo sapiens
ggtaaacgcttaggaaatgt

SEQ ID NO: 5680 - DNA, 20 bp, Homo sapiens
gatcaagatcacacagttag

SEQ ID NO: 5681 - DNA, 20 bp, Homo sapiens
atcaagatcacacagttaga

SEQ ID NO: 5682 - DNA, 20 bp, Homo sapiens
ttgggttcaaatcaggactc

SEQ ID NO: 5683 - DNA, 20 bp, Homo sapiens
gacaaacttgggttcaaatc

SEQ ID NO: 5684 - DNA, 20 bp, Homo sapiens
ctccagaacgagacaaactt

SEQ ID NO: 5685 - DNA, 20 bp, Homo sapiens
gctccagaacgagacaaact

SEQ ID NO: 5686 - DNA, 20 bp, Homo sapiens
aacccaagtttgtctcgttc

SEQ ID NO: 5687 - DNA, 20 bp, Homo sapiens
ttaattccagttttgaaaaa

SEQ ID NO: 5688 - DNA, 20 bp, Homo sapiens
tttaattccagttttgaaaa

SEQ ID NO: 5689 - DNA, 20 bp, Homo sapiens
tgctaaccctttttcaaaac

SEQ ID NO: 5690 - DNA, 20 bp, Homo sapiens
aaagcggagggtgagcactt

SEQ ID NO: 5691 - DNA, 20 bp, Homo sapiens
gaggggcccagcaaagcgga

SEQ ID NO: 5692 - DNA, 20 bp, Homo sapiens
ggaggggcccagcaaagcgg

SEQ ID NO: 5693 - DNA, 20 bp, Homo sapiens
gtgctcaccctccgctttgc

SEQ ID NO: 5694 - DNA, 20 bp, Homo sapiens
cagggaggggcccagcaaag

SEQ ID NO: 5695 - DNA, 20 bp, Homo sapiens
tgctcaccctccgctttgct

SEQ ID NO: 5696 - DNA, 20 bp, Homo sapiens
acgcacctgagggcagggag

SEQ ID NO: 5697 - DNA, 20 bp, Homo sapiens
gacgcacctgagggcaggga

SEQ ID NO: 5698 - DNA, 20 bp, Homo sapiens
agacgcacctgagggcaggg

SEQ ID NO: 5699 - DNA, 20 bp, Homo sapiens
aagagacgcacctgagggca

SEQ ID NO: 5700 - DNA, 20 bp, Homo sapiens
ctgggcccctccctgccctc

SEQ ID NO: 5701 - DNA, 20 bp, Homo sapiens
gaagagacgcacctgagggc

SEQ ID NO: 5702 - DNA, 20 bp, Homo sapiens
agtggaagagacgcacctga

SEQ ID NO: 5703 - DNA, 20 bp, Homo sapiens
gagtggaagagacgcacctg

SEQ ID NO: 5704 - DNA, 20 bp, Homo sapiens
aggctgctgtggcaggtgag

SEQ ID NO: 5705 - DNA, 20 bp, Homo sapiens
tgagcagaggctgctgtggc

SEQ ID NO: 5706 - DNA, 20 bp, Homo sapiens
accctgagcagaggctgctg

SEQ ID NO: 5707 - DNA, 20 bp, Homo sapiens
tgccacagcagcctctgctc

SEQ ID NO: 5708 - DNA, 20 bp, Homo sapiens
cggtctcagaccctgagcag

SEQ ID NO: 5709 - DNA, 20 bp, Homo sapiens
gccacagcagcctctgctca

SEQ ID NO: 5710 - DNA, 20 bp, Homo sapiens
ctctgctcagggtctgagac

SEQ ID NO: 5711 - DNA, 20 bp, Homo sapiens
tctgctcagggtctgagacc

SEQ ID NO: 5712 - DNA, 20 bp, Homo sapiens
tcagggtctgagaccgggaa

SEQ ID NO: 5713 - DNA, 20 bp, Homo sapiens
tgggtagccctcacctttcc

SEQ ID NO: 5714 - DNA, 20 bp, Homo sapiens
gtctgagaccgggaaaggtg

SEQ ID NO: 5715 - DNA, 20 bp, Homo sapiens
tctgagaccgggaaaggtga

SEQ ID NO: 5716 - DNA, 20 bp, Homo sapiens
gggaaaggtgagggctaccc

SEQ ID NO: 5717 - DNA, 20 bp, Homo sapiens
aaaggtgagggctacccagg

SEQ ID NO: 5718 - DNA, 20 bp, Homo sapiens
agaaaacatcagggccacct

SEQ ID NO: 5719 - DNA, 20 bp, Homo sapiens
cagaaaacatcagggccacc

SEQ ID NO: 5720 - DNA, 20 bp, Homo sapiens
ctggctggcagaaaacatca

SEQ ID NO: 5721 - DNA, 20 bp, Homo sapiens
gctggctggcagaaaacatc

SEQ ID NO: 5722 - DNA, 20 bp, Homo sapiens
gagggacctggtgagctggc

SEQ ID NO: 5723 - DNA, 20 bp, Homo sapiens
ctgcgagggacctggtgagc

SEQ ID NO: 5724 - DNA, 20 bp, Homo sapiens
tttctgccagccagctcacc

SEQ ID NO: 5725 - DNA, 20 bp, Homo sapiens
gccgcctgctgcgagggacc

SEQ ID NO: 5726 - DNA, 20 bp, Homo sapiens
ccctttgccgcctgctgcga

SEQ ID NO: 5727 - DNA, 20 bp, Homo sapiens
ctcaccaggtccctcgcagc

SEQ ID NO: 5728 - DNA, 20 bp, Homo sapiens
tccctttgccgcctgctgcg

SEQ ID NO: 5729 - DNA, 20 bp, Homo sapiens
accaggtccctcgcagcagg

SEQ ID NO: 5730 - DNA, 20 bp, Homo sapiens
tccctcgcagcaggcggcaa

SEQ ID NO: 5731 - DNA, 20 bp, Homo sapiens
ccctcgcagcaggcggcaaa

SEQ ID NO: 5732 - DNA, 20 bp, Homo sapiens
tcgcagcaggcggcaaaggg

SEQ ID NO: 5733 - DNA, 20 bp, Homo sapiens
cgcagcaggcggcaaaggga

SEQ ID NO: 5734 - DNA, 20 bp, Homo sapiens
agcaggcggcaaagggaggg

SEQ ID NO: 5735 - DNA, 20 bp, Homo sapiens
ggtttgctgtgaagattatg

SEQ ID NO: 5736 - DNA, 20 bp, Homo sapiens
ggcccagcgctcttgttgtt

SEQ ID NO: 5737 - DNA, 20 bp, Homo sapiens
aggcccagcgctcttgttgt

SEQ ID NO: 5738 - DNA, 20 bp, Homo sapiens
gttcccaacaacaagagcgc

SEQ ID NO: 5739 - DNA, 20 bp, Homo sapiens
ttcccaacaacaagagcgct

SEQ ID NO: 5740 - DNA, 20 bp, Homo sapiens
agaaaagagagggcagagat

SEQ ID NO: 5741 - DNA, 20 bp, Homo sapiens
caggacacacagaaaagaga

SEQ ID NO: 5742 - DNA, 20 bp, Homo sapiens
ccaggacacacagaaaagag

SEQ ID NO: 5743 - DNA, 20 bp, Homo sapiens
cctctcttttctgtgtgtcc

SEQ ID NO: 5744 - DNA, 20 bp, Homo sapiens
ctctcttttctgtgtgtcct

SEQ ID NO: 5745 - DNA, 20 bp, Homo sapiens
gaagccaagtgacttgtccc

SEQ ID NO: 5746 - DNA, 20 bp, Homo sapiens
gtgtcctgggacaagtcact

SEQ ID NO: 5747 - DNA, 20 bp, Homo sapiens
gacaagtcacttggcttctg

SEQ ID NO: 5748 - DNA, 20 bp, Homo sapiens
attttctcatgtgcccagcc

SEQ ID NO: 5749 - DNA, 20 bp, Homo sapiens
ttttctcatgtgcccagcca

SEQ ID NO: 5750 - DNA, 20 bp, Homo sapiens
tttctcatgtgcccagccag

SEQ ID NO: 5751 - DNA, 20 bp, Homo sapiens
tgagggccaaccccctggct

SEQ ID NO: 5752 - DNA, 20 bp, Homo sapiens
ttctcatgtgcccagccagg

SEQ ID NO: 5753 - DNA, 20 bp, Homo sapiens
atgagggccaaccccctggc

SEQ ID NO: 5754 - DNA, 20 bp, Homo sapiens
catgtgcccagccagggggt

SEQ ID NO: 5755 - DNA, 20 bp, Homo sapiens
gcatatgagggccaaccccc

SEQ ID NO: 5756 - DNA, 20 bp, Homo sapiens
gctgctgttattgcatatga

SEQ ID NO: 5757 - DNA, 20 bp, Homo sapiens
tgctgctgttattgcatatg

SEQ ID NO: 5758 - DNA, 20 bp, Homo sapiens
cgcacatggacactcagtaa

SEQ ID NO: 5759 - DNA, 20 bp, Homo sapiens
gcacacgtgcttgacgcaca

SEQ ID NO: 5760 - DNA, 20 bp, Homo sapiens
ttacacttgttcttattatt

SEQ ID NO: 5761 - DNA, 20 bp, Homo sapiens
taatgagtgctcagtaaatg

SEQ ID NO: 5762 - DNA, 20 bp, Homo sapiens
catttactgagcactcatta

SEQ ID NO: 5763 - DNA, 20 bp, Homo sapiens
atttactgagcactcattat

SEQ ID NO: 5764 - DNA, 20 bp, Homo sapiens
ctgagcactcattatgggcc

SEQ ID NO: 5765 - DNA, 20 bp, Homo sapiens
taagcacttagggcagggcc

SEQ ID NO: 5766 - DNA, 20 bp, Homo sapiens
ctaattaagcacttagggca

SEQ ID NO: 5767 - DNA, 20 bp, Homo sapiens
gctaattaagcacttagggc

SEQ ID NO: 5768 - DNA, 20 bp, Homo sapiens
taaagctaattaagcactta

SEQ ID NO: 5769 - DNA, 20 bp, Homo sapiens
ctaaagctaattaagcactt

SEQ ID NO: 5770 - DNA, 20 bp, Homo sapiens
ggggataagataaggattag

SEQ ID NO: 5771 - DNA, 20 bp, Homo sapiens
tgccgtgtggggataagata

SEQ ID NO: 5772 - DNA, 20 bp, Homo sapiens
atccttatcttatccccaca

SEQ ID NO: 5773 - DNA, 20 bp, Homo sapiens
ataacataacatgccgtgtg

SEQ ID NO: 5774 - DNA, 20 bp, Homo sapiens
gataacataacatgccgtgt

SEQ ID NO: 5775 - DNA, 20 bp, Homo sapiens
ggataacataacatgccgtg

SEQ ID NO: 5776 - DNA, 20 bp, Homo sapiens
atgttctcaactgaataatg

SEQ ID NO: 5777 - DNA, 20 bp, Homo sapiens
aatgttctcaactgaataat

SEQ ID NO: 5778 - DNA, 20 bp, Homo sapiens
caatgttctcaactgaataa

SEQ ID NO: 5779 - DNA, 20 bp, Homo sapiens
ttattcagttgagaacattg

SEQ ID NO: 5780 - DNA, 20 bp, Homo sapiens
gagaacattgaggctcaaag

SEQ ID NO: 5781 - DNA, 20 bp, Homo sapiens
caagatcgtttacaagtatt

SEQ ID NO: 5782 - DNA, 20 bp, Homo sapiens
tactaaatggcagctggaag

SEQ ID NO: 5783 - DNA, 20 bp, Homo sapiens
ttactaaatggcagctggaa

SEQ ID NO: 5784 - DNA, 20 bp, Homo sapiens
cttactaaatggcagctgga

SEQ ID NO: 5785 - DNA, 20 bp, Homo sapiens
gagtcttactaaatggcagc

SEQ ID NO: 5786 - DNA, 20 bp, Homo sapiens
gaaattagagtcttactaaa

SEQ ID NO: 5787 - DNA, 20 bp, Homo sapiens
gaagcagacgagatttaggg

SEQ ID NO: 5788 - DNA, 20 bp, Homo sapiens
ggggaagcagacgagattta

SEQ ID NO: 5789 - DNA, 20 bp, Homo sapiens
gggggaagcagacgagattt

SEQ ID NO: 5790 - DNA, 20 bp, Homo sapiens
agatggcgagaaggacgagg

SEQ ID NO: 5791 - DNA, 20 bp, Homo sapiens
gagatggcgagaaggacgag

SEQ ID NO: 5792 - DNA, 20 bp, Homo sapiens
ggagatggcgagaaggacga

SEQ ID NO: 5793 - DNA, 20 bp, Homo sapiens
gggagatggcgagaaggacg

SEQ ID NO: 5794 - DNA, 20 bp, Homo sapiens
tcggtggggagatggcgaga

SEQ ID NO: 5795 - DNA, 20 bp, Homo sapiens
ccaactgctcggtggggaga

SEQ ID NO: 5796 - DNA, 20 bp, Homo sapiens
tcttggccaactgctcggtg

SEQ ID NO: 5797 - DNA, 20 bp, Homo sapiens
atcttggccaactgctcggt

SEQ ID NO: 5798 - DNA, 20 bp, Homo sapiens
gatcttggccaactgctcgg

SEQ ID NO: 5799 - DNA, 20 bp, Homo sapiens
ccatctccccaccgagcagt

SEQ ID NO: 5800 - DNA, 20 bp, Homo sapiens
tcagatcttggccaactgct

SEQ ID NO: 5801 - DNA, 20 bp, Homo sapiens
ccgccatcacggtcagatct

SEQ ID NO: 5802 - DNA, 20 bp, Homo sapiens
tggccaagatctgaccgtga

SEQ ID NO: 5803 - DNA, 20 bp, Homo sapiens
ccaagatctgaccgtgatgg

SEQ ID NO: 5804 - DNA, 20 bp, Homo sapiens
caagccaatggccgccatca

SEQ ID NO: 5805 - DNA, 20 bp, Homo sapiens
ctgaccgtgatggcggccat

SEQ ID NO: 5806 - DNA, 20 bp, Homo sapiens
cgtgatggcggccattggct

SEQ ID NO: 5807 - DNA, 20 bp, Homo sapiens
ggtgaggaagcccaagccaa

SEQ ID NO: 5808 - DNA, 20 bp, Homo sapiens
gtgatggcggccattggctt

SEQ ID NO: 5809 - DNA, 20 bp, Homo sapiens
gtctccggaaactcgaggtg

SEQ ID NO: 5810 - DNA, 20 bp, Homo sapiens
gctgtgtctccggaaactcg

SEQ ID NO: 5811 - DNA, 20 bp, Homo sapiens
gcttcctcacctcgagtttc

SEQ ID NO: 5812 - DNA, 20 bp, Homo sapiens
cactgctccagctgtgtctc

SEQ ID NO: 5813 - DNA, 20 bp, Homo sapiens
cgagtttccggagacacagc

SEQ ID NO: 5814 - DNA, 20 bp, Homo sapiens
gagacacagctggagcagtg

SEQ ID NO: 5815 - DNA, 20 bp, Homo sapiens
cgccagcatgaagaggttga

SEQ ID NO: 5816 - DNA, 20 bp, Homo sapiens
caccaagcgccagcatgaag

SEQ ID NO: 5817 - DNA, 20 bp, Homo sapiens
ggccttcaacctcttcatgc

SEQ ID NO: 5818 - DNA, 20 bp, Homo sapiens
aacctcttcatgctggcgct

SEQ ID NO: 5819 - DNA, 20 bp, Homo sapiens
tgctggcgcttggtgtgcag

SEQ ID NO: 5820 - DNA, 20 bp, Homo sapiens
gctggcgcttggtgtgcagt

SEQ ID NO: 5821 - DNA, 20 bp, Homo sapiens
tgtgcagtgggcaatcctgc

SEQ ID NO: 5822 - DNA, 20 bp, Homo sapiens
cagtgggcaatcctgctgga

SEQ ID NO: 5823 - DNA, 20 bp, Homo sapiens
ggctcaggaagccgtccagc

SEQ ID NO: 5824 - DNA, 20 bp, Homo sapiens
tcccagaagggaactggctc

SEQ ID NO: 5825 - DNA, 20 bp, Homo sapiens
ccaccttcccagaagggaac

SEQ ID NO: 5826 - DNA, 20 bp, Homo sapiens
ttcctgagccagttcccttc

SEQ ID NO: 5827 - DNA, 20 bp, Homo sapiens
tcctgagccagttcccttct

SEQ ID NO: 5828 - DNA, 20 bp, Homo sapiens
tgatgaccaccttcccagaa

SEQ ID NO: 5829 - DNA, 20 bp, Homo sapiens
gtgatgaccaccttcccaga

SEQ ID NO: 5830 - DNA, 20 bp, Homo sapiens
gagccagttcccttctggga

SEQ ID NO: 5831 - DNA, 20 bp, Homo sapiens
ccagttcccttctgggaagg

SEQ ID NO: 5832 - DNA, 20 bp, Homo sapiens
aggtggtcatcacactgttc

SEQ ID NO: 5833 - DNA, 20 bp, Homo sapiens
tcatcacactgttcaggtat

SEQ ID NO: 5834 - DNA, 20 bp, Homo sapiens
catcacactgttcaggtatt

SEQ ID NO: 5835 - DNA, 20 bp, Homo sapiens
acactgttcaggtattggga

SEQ ID NO: 5836 - DNA, 20 bp, Homo sapiens
ctgttcaggtattgggatgg

SEQ ID NO: 5837 - DNA, 20 bp, Homo sapiens
tcaggtattgggatggtggc

SEQ ID NO: 5838 - DNA, 20 bp, Homo sapiens
gatggtggctggatcacttc

SEQ ID NO: 5839 - DNA, 20 bp, Homo sapiens
atggtggctggatcacttct

SEQ ID NO: 5840 - DNA, 20 bp, Homo sapiens
ggatcacttctgggtcatag

SEQ ID NO: 5841 - DNA, 20 bp, Homo sapiens
gatcacttctgggtcataga

SEQ ID NO: 5842 - DNA, 20 bp, Homo sapiens
cttctgggtcatagagggaa

SEQ ID NO: 5843 - DNA, 20 bp, Homo sapiens
tagagggaatggaccccgaa

SEQ ID NO: 5844 - DNA, 20 bp, Homo sapiens
ttctggaacctgtcctttcg

SEQ ID NO: 5845 - DNA, 20 bp, Homo sapiens
cttctggaacctgtcctttc

SEQ ID NO: 5846 - DNA, 20 bp, Homo sapiens
tcttctggaacctgtccttt

SEQ ID NO: 5847 - DNA, 20 bp, Homo sapiens
ggaatggaccccgaaaggac

SEQ ID NO: 5848 - DNA, 20 bp, Homo sapiens
gggcaatatcccagatcttc

SEQ ID NO: 5849 - DNA, 20 bp, Homo sapiens
aggacaggttccagaagatc

SEQ ID NO: 5850 - DNA, 20 bp, Homo sapiens
ggacaggttccagaagatct

SEQ ID NO: 5851 - DNA, 20 bp, Homo sapiens
actggtgctagacagagagg

SEQ ID NO: 5852 - DNA, 20 bp, Homo sapiens
cactggtgctagacagagag

SEQ ID NO: 5853 - DNA, 20 bp, Homo sapiens
gcactggtgctagacagaga

SEQ ID NO: 5854 - DNA, 20 bp, Homo sapiens
agcactggtgctagacagag

SEQ ID NO: 5855 - DNA, 20 bp, Homo sapiens
tcctaaatattgcacagcac

SEQ ID NO: 5856 - DNA, 20 bp, Homo sapiens
accagtgctgtgcaatattt

SEQ ID NO: 5857 - DNA, 20 bp, Homo sapiens
atgaataatcttttagtata

SEQ ID NO: 5858 - DNA, 20 bp, Homo sapiens
tgtttaaaattcaaattaac

SEQ ID NO: 5859 - DNA, 20 bp, Homo sapiens
gtttaaaattcaaattaact

SEQ ID NO: 5860 - DNA, 20 bp, Homo sapiens
agggctgtccagtaaaatac

SEQ ID NO: 5861 - DNA, 20 bp, Homo sapiens
ctgggcatcctgtattttac

SEQ ID NO: 5862 - DNA, 20 bp, Homo sapiens
tccttgtgatacacggagta

SEQ ID NO: 5863 - DNA, 20 bp, Homo sapiens
ttccttgtgatacacggagt

SEQ ID NO: 5864 - DNA, 20 bp, Homo sapiens
cctggattccttgtgataca

SEQ ID NO: 5865 - DNA, 20 bp, Homo sapiens
gccctactccgtgtatcaca

SEQ ID NO: 5866 - DNA, 20 bp, Homo sapiens
ccgtgtatcacaaggaatcc

SEQ ID NO: 5867 - DNA, 20 bp, Homo sapiens
atgcaggaggaatgtaggcc

SEQ ID NO: 5868 - DNA, 20 bp, Homo sapiens
aaaggatgcaggaggaatgt

SEQ ID NO: 5869 - DNA, 20 bp, Homo sapiens
caggaaagaaaggatgcagg

SEQ ID NO: 5870 - DNA, 20 bp, Homo sapiens
taacaggaaagaaaggatgc

SEQ ID NO: 5871 - DNA, 20 bp, Homo sapiens
tcgacaataacaggaaagaa

SEQ ID NO: 5872 - DNA, 20 bp, Homo sapiens
aaatcataatcgacaataac

SEQ ID NO: 5873 - DNA, 20 bp, Homo sapiens
acataatcaatataagttta

SEQ ID NO: 5874 - DNA, 20 bp, Homo sapiens
agtttatggaaaacgtaaga

SEQ ID NO: 5875 - DNA, 20 bp, Homo sapiens
atagaatgtctctctaggtg

SEQ ID NO: 5876 - DNA, 20 bp, Homo sapiens
aaaaaatagaatgtctctct

SEQ ID NO: 5877 - DNA, 20 bp, Homo sapiens
ttttttttttttttttgaga

SEQ ID NO: 5878 - DNA, 20 bp, Homo sapiens
gagtttcacttttgttgccc

SEQ ID NO: 5879 - DNA, 20 bp, Homo sapiens
ttcacttttgttgcccaggc

SEQ ID NO: 5880 - DNA, 20 bp, Homo sapiens
gcgccattgcactccagcct

SEQ ID NO: 5881 - DNA, 20 bp, Homo sapiens
agcgccattgcactccagcc

SEQ ID NO: 5882 - DNA, 20 bp, Homo sapiens
ttgcccaggctggagtgcaa

SEQ ID NO: 5883 - DNA, 20 bp, Homo sapiens
ggagtgcaatggcgctatct

SEQ ID NO: 5884 - DNA, 20 bp, Homo sapiens
aacccagaaggctgaggttg

SEQ ID NO: 5885 - DNA, 20 bp, Homo sapiens
cgcttgaacccagaaggctg

SEQ ID NO: 5886 - DNA, 20 bp, Homo sapiens
acaccacaacctcagccttc

SEQ ID NO: 5887 - DNA, 20 bp, Homo sapiens
caccacaacctcagccttct

SEQ ID NO: 5888 - DNA, 20 bp, Homo sapiens
gagaatcgcttgaacccaga

SEQ ID NO: 5889 - DNA, 20 bp, Homo sapiens
gctactcaggcggctgaggc

SEQ ID NO: 5890 - DNA, 20 bp, Homo sapiens
cccagctactcaggcggctg

SEQ ID NO: 5891 - DNA, 20 bp, Homo sapiens
tgtaatcccagctactcagg

SEQ ID NO: 5892 - DNA, 20 bp, Homo sapiens
gcctgtaatcccagctactc

SEQ ID NO: 5893 - DNA, 20 bp, Homo sapiens
gcctcagccgcctgagtagc

SEQ ID NO: 5894 - DNA, 20 bp, Homo sapiens
cctcagccgcctgagtagct

SEQ ID NO: 5895 - DNA, 20 bp, Homo sapiens
gcctgagtagctgggattac

SEQ ID NO: 5896 - DNA, 20 bp, Homo sapiens
acaaaatcagccaggcgcgg

SEQ ID NO: 5897 - DNA, 20 bp, Homo sapiens
caggcatgtgccaccgcgcc

SEQ ID NO: 5898 - DNA, 20 bp, Homo sapiens
aatacaaaatcagccaggcg

SEQ ID NO: 5899 - DNA, 20 bp, Homo sapiens
ctaaaaatacaaaatcagcc

SEQ ID NO: 5900 - DNA, 20 bp, Homo sapiens
tttgtatttttagtagagat

SEQ ID NO: 5901 - DNA, 20 bp, Homo sapiens
ttgtatttttagtagagata

SEQ ID NO: 5902 - DNA, 20 bp, Homo sapiens
gagatagggtttctccgtgt

SEQ ID NO: 5903 - DNA, 20 bp, Homo sapiens
tgagactagcctgaccaaca

SEQ ID NO: 5904 - DNA, 20 bp, Homo sapiens
agggtttctccgtgttggtc

SEQ ID NO: 5905 - DNA, 20 bp, Homo sapiens
agtctcaaactcctgacctc

SEQ ID NO: 5906 - DNA, 20 bp, Homo sapiens
cgggcggatcacctgaggtc

SEQ ID NO: 5907 - DNA, 20 bp, Homo sapiens
cgaggcgggcggatcacctg

SEQ ID NO: 5908 - DNA, 20 bp, Homo sapiens
ctttgggaggccgaggcggg

SEQ ID NO: 5909 - DNA, 20 bp, Homo sapiens
ctcaggtgatccgcccgcct

SEQ ID NO: 5910 - DNA, 20 bp, Homo sapiens
gcactttgggaggccgaggc

SEQ ID NO: 5911 - DNA, 20 bp, Homo sapiens
agcactttgggaggccgagg

SEQ ID NO: 5912 - DNA, 20 bp, Homo sapiens
cccagcactttgggaggccg

SEQ ID NO: 5913 - DNA, 20 bp, Homo sapiens
tgtaatcccagcactttggg

SEQ ID NO: 5914 - DNA, 20 bp, Homo sapiens
gtctgtaatcccagcacttt

SEQ ID NO: 5915 - DNA, 20 bp, Homo sapiens
gcctcggcctcccaaagtgc

SEQ ID NO: 5916 - DNA, 20 bp, Homo sapiens
tgtctgtaatcccagcactt

SEQ ID NO: 5917 - DNA, 20 bp, Homo sapiens
cctcggcctcccaaagtgct

SEQ ID NO: 5918 - DNA, 20 bp, Homo sapiens
gtctctcaggctggacgcgg

SEQ ID NO: 5919 - DNA, 20 bp, Homo sapiens
aatgtctctcaggctggacg

SEQ ID NO: 5920 - DNA, 20 bp, Homo sapiens
caagagaatgtctctcaggc

SEQ ID NO: 5921 - DNA, 20 bp, Homo sapiens
ttttcaagagaatgtctctc

SEQ ID NO: 5922 - DNA, 20 bp, Homo sapiens
agacattctcttgaaaagaa

SEQ ID NO: 5923 - DNA, 20 bp, Homo sapiens
tattgtctagcagcattagg

SEQ ID NO: 5924 - DNA, 20 bp, Homo sapiens
ttattgtctagcagcattag

SEQ ID NO: 5925 - DNA, 20 bp, Homo sapiens
tttattgtctagcagcatta

SEQ ID NO: 5926 - DNA, 20 bp, Homo sapiens
atttattgtctagcagcatt

SEQ ID NO: 5927 - DNA, 20 bp, Homo sapiens
atttaatgaaaataaaggca

SEQ ID NO: 5928 - DNA, 20 bp, Homo sapiens
aggtaatttaatgaaaataa

SEQ ID NO: 5929 - DNA, 20 bp, Homo sapiens
aatgcatgtaaacaaagcac

SEQ ID NO: 5930 - DNA, 20 bp, Homo sapiens
gcaccatacattagttgtga

SEQ ID NO: 5931 - DNA, 20 bp, Homo sapiens
gaaccatcacaactaatgta

SEQ ID NO: 5932 - DNA, 20 bp, Homo sapiens
gtaacaactattctgacttc

SEQ ID NO: 5933 - DNA, 20 bp, Homo sapiens
aagtcagaatagttgttacc

SEQ ID NO: 5934 - DNA, 20 bp, Homo sapiens
agtcagaatagttgttacct

SEQ ID NO: 5935 - DNA, 20 bp, Homo sapiens
agaatagttgttacctgggc

SEQ ID NO: 5936 - DNA, 20 bp, Homo sapiens
tcaatatccacctcctgccc

SEQ ID NO: 5937 - DNA, 20 bp, Homo sapiens
atagttgttacctgggcagg

SEQ ID NO: 5938 - DNA, 20 bp, Homo sapiens
gttgttacctgggcaggagg

SEQ ID NO: 5939 - DNA, 20 bp, Homo sapiens
gcaggaggtggatattgatt

SEQ ID NO: 5940 - DNA, 20 bp, Homo sapiens
gaggtggatattgattagga

SEQ ID NO: 5941 - DNA, 20 bp, Homo sapiens
aggaacacaaaataaccgca

SEQ ID NO: 5942 - DNA, 20 bp, Homo sapiens
ggaacacaaaataaccgcat

SEQ ID NO: 5943 - DNA, 20 bp, Homo sapiens
gaacacaaaataaccgcatg

SEQ ID NO: 5944 - DNA, 20 bp, Homo sapiens
aacattttctgcaccccatg

SEQ ID NO: 5945 - DNA, 20 bp, Homo sapiens
aaatgttctctatgttcacc

SEQ ID NO: 5946 - DNA, 20 bp, Homo sapiens
aatgttctctatgttcacct

SEQ ID NO: 5947 - DNA, 20 bp, Homo sapiens
ttgatgtgtaatcatcaccc

SEQ ID NO: 5948 - DNA, 20 bp, Homo sapiens
caagctatacacgttttaaa

SEQ ID NO: 5949 - DNA, 20 bp, Homo sapiens
aagctatacacgttttaaaa

SEQ ID NO: 5950 - DNA, 20 bp, Homo sapiens
tacacgttttaaaagggcat

SEQ ID NO: 5951 - DNA, 20 bp, Homo sapiens
aaagggcattggcacttaat

SEQ ID NO: 5952 - DNA, 20 bp, Homo sapiens
gggcattggcacttaatagg

SEQ ID NO: 5953 - DNA, 20 bp, Homo sapiens
ggcacttaataggaggaagt

SEQ ID NO: 5954 - DNA, 20 bp, Homo sapiens
acaaaacaaaacaatgtttc

SEQ ID NO: 5955 - DNA, 20 bp, Homo sapiens
tgggcagcacagggattcag

SEQ ID NO: 5956 - DNA, 20 bp, Homo sapiens
accatcatctgggcagcaca

SEQ ID NO: 5957 - DNA, 20 bp, Homo sapiens
taccatcatctgggcagcac

SEQ ID NO: 5958 - DNA, 20 bp, Homo sapiens
tccctgtgctgcccagatga

SEQ ID NO: 5959 - DNA, 20 bp, Homo sapiens
gatgacgtttaccatcatct

SEQ ID NO: 5960 - DNA, 20 bp, Homo sapiens
ggatgacgtttaccatcatc

SEQ ID NO: 5961 - DNA, 20 bp, Homo sapiens
atgatggtaaacgtcatcct

SEQ ID NO: 5962 - DNA, 20 bp, Homo sapiens
gagaggtccctaagatgcct

SEQ ID NO: 5963 - DNA, 20 bp, Homo sapiens
aacgtcatcctaggcatctt

SEQ ID NO: 5964 - DNA, 20 bp, Homo sapiens
acgtcatcctaggcatctta

SEQ ID NO: 5965 - DNA, 20 bp, Homo sapiens
ggcatcttagggacctctca

SEQ ID NO: 5966 - DNA, 20 bp, Homo sapiens
gaggctggaatggccttgag

SEQ ID NO: 5967 - DNA, 20 bp, Homo sapiens
cttagaaggggaggctggaa

SEQ ID NO: 5968 - DNA, 20 bp, Homo sapiens
agggtcttagaaggggaggc

SEQ ID NO: 5969 - DNA, 20 bp, Homo sapiens
tagcagggtcttagaagggg

SEQ ID NO: 5970 - DNA, 20 bp, Homo sapiens
gtttagcagggtcttagaag

SEQ ID NO: 5971 - DNA, 20 bp, Homo sapiens
ggtttagcagggtcttagaa

SEQ ID NO: 5972 - DNA, 20 bp, Homo sapiens
aggtttagcagggtcttaga

SEQ ID NO: 5973 - DNA, 20 bp, Homo sapiens
cagtgcccagaggtttagca

SEQ ID NO: 5974 - DNA, 20 bp, Homo sapiens
gcagtgcccagaggtttagc

SEQ ID NO: 5975 - DNA, 20 bp, Homo sapiens
ctaagaccctgctaaacctc

SEQ ID NO: 5976 - DNA, 20 bp, Homo sapiens
taagaccctgctaaacctct

SEQ ID NO: 5977 - DNA, 20 bp, Homo sapiens
tgtttaacagcagtgcccag

SEQ ID NO: 5978 - DNA, 20 bp, Homo sapiens
taaacatttctctatgagcc

SEQ ID NO: 5979 - DNA, 20 bp, Homo sapiens
ggagtgctcagcacagttcc

SEQ ID NO: 5980 - DNA, 20 bp, Homo sapiens
gttaaacaaaataatatttg

SEQ ID NO: 5981 - DNA, 20 bp, Homo sapiens
attattttgtttaactcttc

SEQ ID NO: 5982 - DNA, 20 bp, Homo sapiens
ttattttgtttaactcttcc

SEQ ID NO: 5983 - DNA, 20 bp, Homo sapiens
tttgtttaactcttccgggt

SEQ ID NO: 5984 - DNA, 20 bp, Homo sapiens
ttgtttaactcttccgggta

SEQ ID NO: 5985 - DNA, 20 bp, Homo sapiens
taccaggttagatccctacc

SEQ ID NO: 5986 - DNA, 20 bp, Homo sapiens
ttccgggtagggatctaacc

SEQ ID NO: 5987 - DNA, 20 bp, Homo sapiens
cacttccttacctgtatacc

SEQ ID NO: 5988 - DNA, 20 bp, Homo sapiens
agggatctaacctggtatac

SEQ ID NO: 5989 - DNA, 20 bp, Homo sapiens
tctaacctggtatacaggta

SEQ ID NO: 5990 - DNA, 20 bp, Homo sapiens
ctggtatacaggtaaggaag

SEQ ID NO: 5991 - DNA, 20 bp, Homo sapiens
aaggaagtggaagctcagag

SEQ ID NO: 5992 - DNA, 20 bp, Homo sapiens
aggaagtggaagctcagaga

SEQ ID NO: 5993 - DNA, 20 bp, Homo sapiens
gtggaagctcagagagggca

SEQ ID NO: 5994 - DNA, 20 bp, Homo sapiens
agagggcaaggcacttgcct

SEQ ID NO: 5995 - DNA, 20 bp, Homo sapiens
gagggcaaggcacttgccta

SEQ ID NO: 5996 - DNA, 20 bp, Homo sapiens
ccacttagctgtgtggccct

SEQ ID NO: 5997 - DNA, 20 bp, Homo sapiens
atctccaccacttagctgtg

SEQ ID NO: 5998 - DNA, 20 bp, Homo sapiens
cctagggccacacagctaag

SEQ ID NO: 5999 - DNA, 20 bp, Homo sapiens
agggccacacagctaagtgg

SEQ ID NO: 6000 - DNA, 20 bp, Homo sapiens
acacagctaagtggtggaga

SEQ ID NO: 6001 - DNA, 20 bp, Homo sapiens
aaaaggttataataaaaagt

SEQ ID NO: 6002 - DNA, 20 bp, Homo sapiens
cactctggagcatgtggaaa

SEQ ID NO: 6003 - DNA, 20 bp, Homo sapiens
tctgagcactctggagcatg

SEQ ID NO: 6004 - DNA, 20 bp, Homo sapiens
gtttcatgttctgagcactc

SEQ ID NO: 6005 - DNA, 20 bp, Homo sapiens
ctccagggccaatcgggagc

SEQ ID NO: 6006 - DNA, 20 bp, Homo sapiens
cagtctagccagctcccgat

SEQ ID NO: 6007 - DNA, 20 bp, Homo sapiens
ttttccctccagggccaatc

SEQ ID NO: 6008 - DNA, 20 bp, Homo sapiens
tttttccctccagggccaat

SEQ ID NO: 6009 - DNA, 20 bp, Homo sapiens
agccagctcccgattggccc

SEQ ID NO: 6010 - DNA, 20 bp, Homo sapiens
cagctcccgattggccctgg

SEQ ID NO: 6011 - DNA, 20 bp, Homo sapiens
agctcccgattggccctgga

SEQ ID NO: 6012 - DNA, 20 bp, Homo sapiens
tataaagttttttccctcca

SEQ ID NO: 6013 - DNA, 20 bp, Homo sapiens
atataaagttttttccctcc

SEQ ID NO: 6014 - DNA, 20 bp, Homo sapiens
atatatttttcttttttaaa

SEQ ID NO: 6015 - DNA, 20 bp, Homo sapiens
ttcttttttaaaaggtttag

SEQ ID NO: 6016 - DNA, 20 bp, Homo sapiens
tttttaaaaggtttagaggc

SEQ ID NO: 6017 - DNA, 20 bp, Homo sapiens
ttttaaaaggtttagaggct

SEQ ID NO: 6018 - DNA, 20 bp, Homo sapiens
aaaggtttagaggctgggca

SEQ ID NO: 6019 - DNA, 20 bp, Homo sapiens
ggtttagaggctgggcatgg

SEQ ID NO: 6020 - DNA, 20 bp, Homo sapiens
cccaaaagtactgggattac

SEQ ID NO: 6021 - DNA, 20 bp, Homo sapiens
cctcggttcccaaaagtact

SEQ ID NO: 6022 - DNA, 20 bp, Homo sapiens
acctcggttcccaaaagtac

SEQ ID NO: 6023 - DNA, 20 bp, Homo sapiens
acctgtaatcccagtacttt

SEQ ID NO: 6024 - DNA, 20 bp, Homo sapiens
cctgtaatcccagtactttt

SEQ ID NO: 6025 - DNA, 20 bp, Homo sapiens
cccagtacttttgggaaccg

SEQ ID NO: 6026 - DNA, 20 bp, Homo sapiens
agtacttttgggaaccgagg

SEQ ID NO: 6027 - DNA, 20 bp, Homo sapiens
gtacttttgggaaccgaggt

SEQ ID NO: 6028 - DNA, 20 bp, Homo sapiens
ctcaagtgatctgcccacct

SEQ ID NO: 6029 - DNA, 20 bp, Homo sapiens
caggctggtcttaaacttct

SEQ ID NO: 6030 - DNA, 20 bp, Homo sapiens
tcaggctggtcttaaacttc

SEQ ID NO: 6031 - DNA, 20 bp, Homo sapiens
tctcactgtgttagtcaggc

SEQ ID NO: 6032 - DNA, 20 bp, Homo sapiens
aggatctcactgtgttagtc

SEQ ID NO: 6033 - DNA, 20 bp, Homo sapiens
tttctattttctgcagagac

SEQ ID NO: 6034 - DNA, 20 bp, Homo sapiens
agaaaatagaaaaatcagct

SEQ ID NO: 6035 - DNA, 20 bp, Homo sapiens
atagaaaaatcagctaggcg

SEQ ID NO: 6036 - DNA, 20 bp, Homo sapiens
gaaaaatcagctaggcgtgg

SEQ ID NO: 6037 - DNA, 20 bp, Homo sapiens
tcccaagtagctgggactgt

SEQ ID NO: 6038 - DNA, 20 bp, Homo sapiens
ctcccaagtagctgggactg

SEQ ID NO: 6039 - DNA, 20 bp, Homo sapiens
cctcagcctcccaagtagct

SEQ ID NO: 6040 - DNA, 20 bp, Homo sapiens
cacccacagtcccagctact

SEQ ID NO: 6041 - DNA, 20 bp, Homo sapiens
gcctcagcctcccaagtagc

SEQ ID NO: 6042 - DNA, 20 bp, Homo sapiens
acccacagtcccagctactt

SEQ ID NO: 6043 - DNA, 20 bp, Homo sapiens
cacagtcccagctacttggg

SEQ ID NO: 6044 - DNA, 20 bp, Homo sapiens
cccagctacttgggaggctg

SEQ ID NO: 6045 - DNA, 20 bp, Homo sapiens
gctacttgggaggctgaggc

SEQ ID NO: 6046 - DNA, 20 bp, Homo sapiens
acttgggaggctgaggcagg

SEQ ID NO: 6047 - DNA, 20 bp, Homo sapiens
gcctcaacctcactgggttc

SEQ ID NO: 6048 - DNA, 20 bp, Homo sapiens
aggatcacctgaacccagtg

SEQ ID NO: 6049 - DNA, 20 bp, Homo sapiens
cactcagcctcaacctcact

SEQ ID NO: 6050 - DNA, 20 bp, Homo sapiens
tcactcagcctcaacctcac

SEQ ID NO: 6051 - DNA, 20 bp, Homo sapiens
acctgaacccagtgaggttg

SEQ ID NO: 6052 - DNA, 20 bp, Homo sapiens
ggagtgaagtggcacgatca

SEQ ID NO: 6053 - DNA, 20 bp, Homo sapiens
ttgtccaggctggagtgaag

SEQ ID NO: 6054 - DNA, 20 bp, Homo sapiens
cgtgccacttcactccagcc

SEQ ID NO: 6055 - DNA, 20 bp, Homo sapiens
tctcactctgttgtccaggc

SEQ ID NO: 6056 - DNA, 20 bp, Homo sapiens
agggtctcactctgttgtcc

SEQ ID NO: 6057 - DNA, 20 bp, Homo sapiens
taaaactgttttttgagaca

SEQ ID NO: 6058 - DNA, 20 bp, Homo sapiens
ctaaaactgttttttgagac

SEQ ID NO: 6059 - DNA, 20 bp, Homo sapiens
ctgtctcaaaaaacagtttt

SEQ ID NO: 6060 - DNA, 20 bp, Homo sapiens
tgtctcaaaaaacagtttta

SEQ ID NO: 6061 - DNA, 20 bp, Homo sapiens
gtctcaaaaaacagttttag

SEQ ID NO: 6062 - DNA, 20 bp, Homo sapiens
caaaaaacagttttaggggc

SEQ ID NO: 6063 - DNA, 20 bp, Homo sapiens
aaaaaacagttttaggggcc

SEQ ID NO: 6064 - DNA, 20 bp, Homo sapiens
caggcatgaaccactgcgcc

SEQ ID NO: 6065 - DNA, 20 bp, Homo sapiens
gttttaggggccgggcgcag

SEQ ID NO: 6066 - DNA, 20 bp, Homo sapiens
tcccaaagtgctgggattac

SEQ ID NO: 6067 - DNA, 20 bp, Homo sapiens
ccttggcctcccaaagtgct

SEQ ID NO: 6068 - DNA, 20 bp, Homo sapiens
tgcctgtaatcccagcactt

SEQ ID NO: 6069 - DNA, 20 bp, Homo sapiens
gccttggcctcccaaagtgc

SEQ ID NO: 6070 - DNA, 20 bp, Homo sapiens
gcctgtaatcccagcacttt

SEQ ID NO: 6071 - DNA, 20 bp, Homo sapiens
tgtaatcccagcactttggg

SEQ ID NO: 6072 - DNA, 20 bp, Homo sapiens
cccagcactttgggaggcca

SEQ ID NO: 6073 - DNA, 20 bp, Homo sapiens
agcactttgggaggccaagg

SEQ ID NO: 6074 - DNA, 20 bp, Homo sapiens
gcactttgggaggccaaggc

SEQ ID NO: 6075 - DNA, 20 bp, Homo sapiens
cactttgggaggccaaggcg

SEQ ID NO: 6076 - DNA, 20 bp, Homo sapiens
actttgggaggccaaggcgg

SEQ ID NO: 6077 - DNA, 20 bp, Homo sapiens
acctcatgatccccccgcct

SEQ ID NO: 6078 - DNA, 20 bp, Homo sapiens
ctttgggaggccaaggcggg

SEQ ID NO: 6079 - DNA, 20 bp, Homo sapiens
gccaaggcggggggatcatg

SEQ ID NO: 6080 - DNA, 20 bp, Homo sapiens
ggcggggggatcatgaggtc

SEQ ID NO: 6081 - DNA, 20 bp, Homo sapiens
tcaggagatcgagaccatcc

SEQ ID NO: 6082 - DNA, 20 bp, Homo sapiens
tttctccgagttagccagga

SEQ ID NO: 6083 - DNA, 20 bp, Homo sapiens
agggtttctccgagttagcc

SEQ ID NO: 6084 - DNA, 20 bp, Homo sapiens
cgagaccatcctggctaact

SEQ ID NO: 6085 - DNA, 20 bp, Homo sapiens
ttgtatttttagtagagaca

SEQ ID NO: 6086 - DNA, 20 bp, Homo sapiens
tttgtatttttagtagagac

SEQ ID NO: 6087 - DNA, 20 bp, Homo sapiens
taaaaatacaaaaaattagc

SEQ ID NO: 6088 - DNA, 20 bp, Homo sapiens
aaaaatacaaaaaattagcc

SEQ ID NO: 6089 - DNA, 20 bp, Homo sapiens
tacaaaaaattagccgggcg

SEQ ID NO: 6090 - DNA, 20 bp, Homo sapiens
caggcgcccaccaccacgcc

SEQ ID NO: 6091 - DNA, 20 bp, Homo sapiens
aaaaaattagccgggcgtgg

SEQ ID NO: 6092 - DNA, 20 bp, Homo sapiens
aaattagccgggcgtggtgg

SEQ ID NO: 6093 - DNA, 20 bp, Homo sapiens
aattagccgggcgtggtggt

SEQ ID NO: 6094 - DNA, 20 bp, Homo sapiens
tcccgagtggctgggactac

SEQ ID NO: 6095 - DNA, 20 bp, Homo sapiens
cctcagcctcccgagtggct

SEQ ID NO: 6096 - DNA, 20 bp, Homo sapiens
cgcctgtagtcccagccact

SEQ ID NO: 6097 - DNA, 20 bp, Homo sapiens
gcctcagcctcccgagtggc

SEQ ID NO: 6098 - DNA, 20 bp, Homo sapiens
gcctgtagtcccagccactc

SEQ ID NO: 6099 - DNA, 20 bp, Homo sapiens
tgtagtcccagccactcggg

SEQ ID NO: 6100 - DNA, 20 bp, Homo sapiens
tcctgcctcagcctcccgag

SEQ ID NO: 6101 - DNA, 20 bp, Homo sapiens
cccagccactcgggaggctg

SEQ ID NO: 6102 - DNA, 20 bp, Homo sapiens
gccactcgggaggctgaggc

SEQ ID NO: 6103 - DNA, 20 bp, Homo sapiens
gggaggctgaggcaggagaa

SEQ ID NO: 6104 - DNA, 20 bp, Homo sapiens
gcaggagaatggcgtgaacc

SEQ ID NO: 6105 - DNA, 20 bp, Homo sapiens
caggagaatggcgtgaaccc

SEQ ID NO: 6106 - DNA, 20 bp, Homo sapiens
gagaatggcgtgaacccggg

SEQ ID NO: 6107 - DNA, 20 bp, Homo sapiens
aatggcgtgaacccgggagg

SEQ ID NO: 6108 - DNA, 20 bp, Homo sapiens
cactgcaaactccgcctccc

SEQ ID NO: 6109 - DNA, 20 bp, Homo sapiens
tcactgcaaactccgcctcc

SEQ ID NO: 6110 - DNA, 20 bp, Homo sapiens
gagtttgcagtgaaccgaga

SEQ ID NO: 6111 - DNA, 20 bp, Homo sapiens
ggagtgcagtggcaccatct

SEQ ID NO: 6112 - DNA, 20 bp, Homo sapiens
tcacccaggctggagtgcag

SEQ ID NO: 6113 - DNA, 20 bp, Homo sapiens
ggtgccactgcactccagcc

SEQ ID NO: 6114 - DNA, 20 bp, Homo sapiens
gtgccactgcactccagcct

SEQ ID NO: 6115 - DNA, 20 bp, Homo sapiens
tctcgctctgtcacccaggc

SEQ ID NO: 6116 - DNA, 20 bp, Homo sapiens
ggagtctcgctctgtcaccc

SEQ ID NO: 6117 - DNA, 20 bp, Homo sapiens
tttgttttttttttttgaga

SEQ ID NO: 6118 - DNA, 20 bp, Homo sapiens
aaaaaaacaaaaacagtttt

SEQ ID NO: 6119 - DNA, 20 bp, Homo sapiens
aacaaaaacagttttaggcc

SEQ ID NO: 6120 - DNA, 20 bp, Homo sapiens
aaacagttttaggccaggcg

SEQ ID NO: 6121 - DNA, 20 bp, Homo sapiens
caggcatgaaccaccgcgcc

SEQ ID NO: 6122 - DNA, 20 bp, Homo sapiens
cagttttaggccaggcgcgg

SEQ ID NO: 6123 - DNA, 20 bp, Homo sapiens
tcctaaagtactaggattac

SEQ ID NO: 6124 - DNA, 20 bp, Homo sapiens
gctaggcctcctaaagtact

SEQ ID NO: 6125 - DNA, 20 bp, Homo sapiens
gcctgtaatcctagtacttt

SEQ ID NO: 6126 - DNA, 20 bp, Homo sapiens
tgtaatcctagtactttagg

SEQ ID NO: 6127 - DNA, 20 bp, Homo sapiens
agtactttaggaggcctagc

SEQ ID NO: 6128 - DNA, 20 bp, Homo sapiens
actttaggaggcctagcagg

SEQ ID NO: 6129 - DNA, 20 bp, Homo sapiens
cctcaggtaatccacctgct

SEQ ID NO: 6130 - DNA, 20 bp, Homo sapiens
cctagcaggtggattacctg

SEQ ID NO: 6131 - DNA, 20 bp, Homo sapiens
caggtggattacctgaggtc

SEQ ID NO: 6132 - DNA, 20 bp, Homo sapiens
ggtctcggactcctgacctc

SEQ ID NO: 6133 - DNA, 20 bp, Homo sapiens
catgttgctcaggttggtct

SEQ ID NO: 6134 - DNA, 20 bp, Homo sapiens
tttcaccatgttgctcaggt

SEQ ID NO: 6135 - DNA, 20 bp, Homo sapiens
aggatttcaccatgttgctc

SEQ ID NO: 6136 - DNA, 20 bp, Homo sapiens
cgagaccaacctgagcaaca

SEQ ID NO: 6137 - DNA, 20 bp, Homo sapiens
tttgtgtttttagtagagac

SEQ ID NO: 6138 - DNA, 20 bp, Homo sapiens
ctaaaaacacaaaaattagc

SEQ ID NO: 6139 - DNA, 20 bp, Homo sapiens
taaaaacacaaaaattagct

SEQ ID NO: 6140 - DNA, 20 bp, Homo sapiens
acacaaaaattagctgggtg

SEQ ID NO: 6141 - DNA, 20 bp, Homo sapiens
caaaaattagctgggtgtgg

SEQ ID NO: 6142 - DNA, 20 bp, Homo sapiens
aattagctgggtgtggcggc

SEQ ID NO: 6143 - DNA, 20 bp, Homo sapiens
tcccaagtagctgggattac

SEQ ID NO: 6144 - DNA, 20 bp, Homo sapiens
cctcagcctcccaagtagct

SEQ ID NO: 6145 - DNA, 20 bp, Homo sapiens
cacctgtaatcccagctact

SEQ ID NO: 6146 - DNA, 20 bp, Homo sapiens
gcctcagcctcccaagtagc

SEQ ID NO: 6147 - DNA, 20 bp, Homo sapiens
acctgtaatcccagctactt

SEQ ID NO: 6148 - DNA, 20 bp, Homo sapiens
tgtaatcccagctacttggg

SEQ ID NO: 6149 - DNA, 20 bp, Homo sapiens
cccagctacttgggaggctg

SEQ ID NO: 6150 - DNA, 20 bp, Homo sapiens
gctacttgggaggctgaggc

SEQ ID NO: 6151 - DNA, 20 bp, Homo sapiens
gcaggcgaatcacttgaacc

SEQ ID NO: 6152 - DNA, 20 bp, Homo sapiens
caggcgaatcacttgaaccc

SEQ ID NO: 6153 - DNA, 20 bp, Homo sapiens
gcgaatcacttgaacccggg

SEQ ID NO: 6154 - DNA, 20 bp, Homo sapiens
aatcacttgaacccgggagg

SEQ ID NO: 6155 - DNA, 20 bp, Homo sapiens
cactatagcctccgcctccc

SEQ ID NO: 6156 - DNA, 20 bp, Homo sapiens
tcactatagcctccgcctcc

SEQ ID NO: 6157 - DNA, 20 bp, Homo sapiens
cacttgaacccgggaggcgg

SEQ ID NO: 6158 - DNA, 20 bp, Homo sapiens
acagtgcaatggtgcgatct

SEQ ID NO: 6159 - DNA, 20 bp, Homo sapiens
tcgcccaggctacagtgcaa

SEQ ID NO: 6160 - DNA, 20 bp, Homo sapiens
cgcaccattgcactgtagcc

SEQ ID NO: 6161 - DNA, 20 bp, Homo sapiens
gcaccattgcactgtagcct

SEQ ID NO: 6162 - DNA, 20 bp, Homo sapiens
agagcctcactctgtcgccc

SEQ ID NO: 6163 - DNA, 20 bp, Homo sapiens
gtagcctgggcgacagagtg

SEQ ID NO: 6164 - DNA, 20 bp, Homo sapiens
tgtgtgtattgaattctggt

SEQ ID NO: 6165 - DNA, 20 bp, Homo sapiens
gtgtgtgtattgaattctgg

SEQ ID NO: 6166 - DNA, 20 bp, Homo sapiens
tgcgtgtgtgtattgaattc

SEQ ID NO: 6167 - DNA, 20 bp, Homo sapiens
atacacacactgtgtccacc

SEQ ID NO: 6168 - DNA, 20 bp, Homo sapiens
tacacacactgtgtccacct

SEQ ID NO: 6169 - DNA, 20 bp, Homo sapiens
gccctttgtcacttcccagg

SEQ ID NO: 6170 - DNA, 20 bp, Homo sapiens
ggtgccctttgtcacttccc

SEQ ID NO: 6171 - DNA, 20 bp, Homo sapiens
gtccacctgggaagtgacaa

SEQ ID NO: 6172 - DNA, 20 bp, Homo sapiens
tccacctgggaagtgacaaa

SEQ ID NO: 6173 - DNA, 20 bp, Homo sapiens
ggaagtgacaaagggcaccc

SEQ ID NO: 6174 - DNA, 20 bp, Homo sapiens
gaagtgacaaagggcaccct

SEQ ID NO: 6175 - DNA, 20 bp, Homo sapiens
aagtgacaaagggcaccctg

SEQ ID NO: 6176 - DNA, 20 bp, Homo sapiens
agtgacaaagggcaccctgg

SEQ ID NO: 6177 - DNA, 20 bp, Homo sapiens
ccaccatttgaaatccccca

SEQ ID NO: 6178 - DNA, 20 bp, Homo sapiens
accaccatttgaaatccccc

SEQ ID NO: 6179 - DNA, 20 bp, Homo sapiens
gcaccctgggggatttcaaa

SEQ ID NO: 6180 - DNA, 20 bp, Homo sapiens
ccctgggggatttcaaatgg

SEQ ID NO: 6181 - DNA, 20 bp, Homo sapiens
tgggggatttcaaatggtgg

SEQ ID NO: 6182 - DNA, 20 bp, Homo sapiens
atttcaaatggtggtggccc

SEQ ID NO: 6183 - DNA, 20 bp, Homo sapiens
aaatggtggtggccctggtt

SEQ ID NO: 6184 - DNA, 20 bp, Homo sapiens
aaggcagcaacaccaaacca

SEQ ID NO: 6185 - DNA, 20 bp, Homo sapiens
taaggcagcaacaccaaacc

SEQ ID NO: 6186 - DNA, 20 bp, Homo sapiens
gctggtgtgaccttaagcta

SEQ ID NO: 6187 - DNA, 20 bp, Homo sapiens
ggtgttgctgccttagctta

SEQ ID NO: 6188 - DNA, 20 bp, Homo sapiens
tggggcaggaggctgaaggc

SEQ ID NO: 6189 - DNA, 20 bp, Homo sapiens
actgtggggcaggaggctga

SEQ ID NO: 6190 - DNA, 20 bp, Homo sapiens
gccctagactgtggggcagg

SEQ ID NO: 6191 - DNA, 20 bp, Homo sapiens
gcagccctagactgtggggc

SEQ ID NO: 6192 - DNA, 20 bp, Homo sapiens
gggagcagccctagactgtg

SEQ ID NO: 6193 - DNA, 20 bp, Homo sapiens
ggggagcagccctagactgt

SEQ ID NO: 6194 - DNA, 20 bp, Homo sapiens
agcctcctgccccacagtct

SEQ ID NO: 6195 - DNA, 20 bp, Homo sapiens
aggggagcagccctagactg

SEQ ID NO: 6196 - DNA, 20 bp, Homo sapiens
gcctcctgccccacagtcta

SEQ ID NO: 6197 - DNA, 20 bp, Homo sapiens
ccctgtggacatcagatgag

SEQ ID NO: 6198 - DNA, 20 bp, Homo sapiens
tccctgtggacatcagatga

SEQ ID NO: 6199 - DNA, 20 bp, Homo sapiens
gtccctgtggacatcagatg

SEQ ID NO: 6200 - DNA, 20 bp, Homo sapiens
tcccctcatctgatgtccac

SEQ ID NO: 6201 - DNA, 20 bp, Homo sapiens
cccctcatctgatgtccaca

SEQ ID NO: 6202 - DNA, 20 bp, Homo sapiens
caagaacaaacaggtccctg

SEQ ID NO: 6203 - DNA, 20 bp, Homo sapiens
agattgagtcaagaacaaac

SEQ ID NO: 6204 - DNA, 20 bp, Homo sapiens
ctcaatctagaaagacgaga

SEQ ID NO: 6205 - DNA, 20 bp, Homo sapiens
tcaatctagaaagacgagaa

SEQ ID NO: 6206 - DNA, 20 bp, Homo sapiens
agcagtcaggggtggggcag

SEQ ID NO: 6207 - DNA, 20 bp, Homo sapiens
aagcagtcaggggtggggca

SEQ ID NO: 6208 - DNA, 20 bp, Homo sapiens
caagcagtcaggggtggggc

SEQ ID NO: 6209 - DNA, 20 bp, Homo sapiens
gatccaagcagtcaggggtg

SEQ ID NO: 6210 - DNA, 20 bp, Homo sapiens
ggatccaagcagtcaggggt

SEQ ID NO: 6211 - DNA, 20 bp, Homo sapiens
gggatccaagcagtcagggg

SEQ ID NO: 6212 - DNA, 20 bp, Homo sapiens
agggggatccaagcagtcag

SEQ ID NO: 6213 - DNA, 20 bp, Homo sapiens
tagggggatccaagcagtca

SEQ ID NO: 6214 - DNA, 20 bp, Homo sapiens
ctagggggatccaagcagtc

SEQ ID NO: 6215 - DNA, 20 bp, Homo sapiens
ctgccccacccctgactgct

SEQ ID NO: 6216 - DNA, 20 bp, Homo sapiens
ctgactgcttggatccccct

SEQ ID NO: 6217 - DNA, 20 bp, Homo sapiens
tgactgcttggatcccccta

SEQ ID NO: 6218 - DNA, 20 bp, Homo sapiens
gactgcttggatccccctag

SEQ ID NO: 6219 - DNA, 20 bp, Homo sapiens
cagcaggggtcacccctagg

SEQ ID NO: 6220 - DNA, 20 bp, Homo sapiens
tcagcaggggtcacccctag

SEQ ID NO: 6221 - DNA, 20 bp, Homo sapiens
ttcagcaggggtcaccccta

SEQ ID NO: 6222 - DNA, 20 bp, Homo sapiens
tttcagcaggggtcacccct

SEQ ID NO: 6223 - DNA, 20 bp, Homo sapiens
gaaggagccagtttcagcag

SEQ ID NO: 6224 - DNA, 20 bp, Homo sapiens
ggaaggagccagtttcagca

SEQ ID NO: 6225 - DNA, 20 bp, Homo sapiens
aggaaggagccagtttcagc

SEQ ID NO: 6226 - DNA, 20 bp, Homo sapiens
ggggtgacccctgctgaaac

SEQ ID NO: 6227 - DNA, 20 bp, Homo sapiens
ctgacgggaaccggtcagga

SEQ ID NO: 6228 - DNA, 20 bp, Homo sapiens
gaaactggctccttcctgac

SEQ ID NO: 6229 - DNA, 20 bp, Homo sapiens
agccctgacgggaaccggtc

SEQ ID NO: 6230 - DNA, 20 bp, Homo sapiens
agcacagccctgacgggaac

SEQ ID NO: 6231 - DNA, 20 bp, Homo sapiens
cttcctgaccggttcccgtc

SEQ ID NO: 6232 - DNA, 20 bp, Homo sapiens
ttcctgaccggttcccgtca

SEQ ID NO: 6233 - DNA, 20 bp, Homo sapiens
cccatcagcacagccctgac

SEQ ID NO: 6234 - DNA, 20 bp, Homo sapiens
acccatcagcacagccctga

SEQ ID NO: 6235 - DNA, 20 bp, Homo sapiens
tcccgtcagggctgtgctga

SEQ ID NO: 6236 - DNA, 20 bp, Homo sapiens
cccgtcagggctgtgctgat

SEQ ID NO: 6237 - DNA, 20 bp, Homo sapiens
gtcagggctgtgctgatggg

SEQ ID NO: 6238 - DNA, 20 bp, Homo sapiens
tgtgctgatgggtggtgccc

SEQ ID NO: 6239 - DNA, 20 bp, Homo sapiens
ccgtccccaggggcaggcct

SEQ ID NO: 6240 - DNA, 20 bp, Homo sapiens
cccgtccccaggggcaggcc

SEQ ID NO: 6241 - DNA, 20 bp, Homo sapiens
gtggtgcccaggcctgcccc

SEQ ID NO: 6242 - DNA, 20 bp, Homo sapiens
tggtgcccaggcctgcccct

SEQ ID NO: 6243 - DNA, 20 bp, Homo sapiens
agtaccccgtccccaggggc

SEQ ID NO: 6244 - DNA, 20 bp, Homo sapiens
ggtgcccaggcctgcccctg

SEQ ID NO: 6245 - DNA, 20 bp, Homo sapiens
ggagagtaccccgtccccag

SEQ ID NO: 6246 - DNA, 20 bp, Homo sapiens
cccaggcctgcccctgggga

SEQ ID NO: 6247 - DNA, 20 bp, Homo sapiens
gggagagtaccccgtcccca

SEQ ID NO: 6248 - DNA, 20 bp, Homo sapiens
ccaggcctgcccctggggac

SEQ ID NO: 6249 - DNA, 20 bp, Homo sapiens
agggagagtaccccgtcccc

SEQ ID NO: 6250 - DNA, 20 bp, Homo sapiens
caggcctgcccctggggacg

SEQ ID NO: 6251 - DNA, 20 bp, Homo sapiens
ggggacggggtactctccct

SEQ ID NO: 6252 - DNA, 20 bp, Homo sapiens
acaagctggagtgttgccaa

SEQ ID NO: 6253 - DNA, 20 bp, Homo sapiens
cacaagctggagtgttgcca

SEQ ID NO: 6254 - DNA, 20 bp, Homo sapiens
ccaagtcaagtggcacaagc

SEQ ID NO: 6255 - DNA, 20 bp, Homo sapiens
caaatcagtcccaagtcaag

SEQ ID NO: 6256 - DNA, 20 bp, Homo sapiens
ccagcttgtgccacttgact

SEQ ID NO: 6257 - DNA, 20 bp, Homo sapiens
cagcttgtgccacttgactt

SEQ ID NO: 6258 - DNA, 20 bp, Homo sapiens
cacttgacttgggactgatt

SEQ ID NO: 6259 - DNA, 20 bp, Homo sapiens
gttctgttttgagtcccttc

SEQ ID NO: 6260 - DNA, 20 bp, Homo sapiens
ttctgttttgagtcccttca

SEQ ID NO: 6261 - DNA, 20 bp, Homo sapiens
tctgttttgagtcccttcag

SEQ ID NO: 6262 - DNA, 20 bp, Homo sapiens
agataggcccctcccctgaa

SEQ ID NO: 6263 - DNA, 20 bp, Homo sapiens
aagataggcccctcccctga

SEQ ID NO: 6264 - DNA, 20 bp, Homo sapiens
gttttgagtcccttcagggg

SEQ ID NO: 6265 - DNA, 20 bp, Homo sapiens
ttttgagtcccttcagggga

SEQ ID NO: 6266 - DNA, 20 bp, Homo sapiens
tttgagtcccttcaggggag

SEQ ID NO: 6267 - DNA, 20 bp, Homo sapiens
acaacaacgttgaataagat

SEQ ID NO: 6268 - DNA, 20 bp, Homo sapiens
tgctaagttatcagtatgtg

SEQ ID NO: 6269 - DNA, 20 bp, Homo sapiens
catactgataacttagcaaa

SEQ ID NO: 6270 - DNA, 20 bp, Homo sapiens
ataacttagcaaatggctat

SEQ ID NO: 6271 - DNA, 20 bp, Homo sapiens
ggagcaaaaatgaaaataaa

SEQ ID NO: 6272 - DNA, 20 bp, Homo sapiens
aaataaacggaactctgaag

SEQ ID NO: 6273 - DNA, 20 bp, Homo sapiens
aataaacggaactctgaagt

SEQ ID NO: 6274 - DNA, 20 bp, Homo sapiens
ttatttatttttttagagac

SEQ ID NO: 6275 - DNA, 20 bp, Homo sapiens
tatttatttttttagagaca

SEQ ID NO: 6276 - DNA, 20 bp, Homo sapiens
tcttgctctgttgcccagtc

SEQ ID NO: 6277 - DNA, 20 bp, Homo sapiens
gtaccactgcactccagact

SEQ ID NO: 6278 - DNA, 20 bp, Homo sapiens
tgtaccactgcactccagac

SEQ ID NO: 6279 - DNA, 20 bp, Homo sapiens
ttgcccagtctggagtgcag

SEQ ID NO: 6280 - DNA, 20 bp, Homo sapiens
cacttgagcccaggaggcac

SEQ ID NO: 6281 - DNA, 20 bp, Homo sapiens
tcattgcagcctgtgcctcc

SEQ ID NO: 6282 - DNA, 20 bp, Homo sapiens
cattgcagcctgtgcctcct

SEQ ID NO: 6283 - DNA, 20 bp, Homo sapiens
gaggatcacttgagcccagg

SEQ ID NO: 6284 - DNA, 20 bp, Homo sapiens
tgggaggatcacttgagccc

SEQ ID NO: 6285 - DNA, 20 bp, Homo sapiens
actcaggaggctgaggtggg

SEQ ID NO: 6286 - DNA, 20 bp, Homo sapiens
ttaactcaggaggctgaggt

SEQ ID NO: 6287 - DNA, 20 bp, Homo sapiens
tttaactcaggaggctgagg

SEQ ID NO: 6288 - DNA, 20 bp, Homo sapiens
aaatttaactcaggaggctg

SEQ ID NO: 6289 - DNA, 20 bp, Homo sapiens
gtaaaaaaatttaactcagg

SEQ ID NO: 6290 - DNA, 20 bp, Homo sapiens
cctgtaaaaaaatttaactc

SEQ ID NO: 6291 - DNA, 20 bp, Homo sapiens
cctgagttaaatttttttac

SEQ ID NO: 6292 - DNA, 20 bp, Homo sapiens
aattagcagggcatggtagc

SEQ ID NO: 6293 - DNA, 20 bp, Homo sapiens
atacaaaaattagcagggca

SEQ ID NO: 6294 - DNA, 20 bp, Homo sapiens
taaaaatacaaaaattagca

SEQ ID NO: 6295 - DNA, 20 bp, Homo sapiens
ctaaaaatacaaaaattagc

SEQ ID NO: 6296 - DNA, 20 bp, Homo sapiens
ttttgtatttttagtagaca

SEQ ID NO: 6297 - DNA, 20 bp, Homo sapiens
tttgtatttttagtagacaa

SEQ ID NO: 6298 - DNA, 20 bp, Homo sapiens
ttgtatttttagtagacaag

SEQ ID NO: 6299 - DNA, 20 bp, Homo sapiens
agtagacaaggggtttcacc

SEQ ID NO: 6300 - DNA, 20 bp, Homo sapiens
agacaaggggtttcaccagg

SEQ ID NO: 6301 - DNA, 20 bp, Homo sapiens
gacaaggggtttcaccaggt

SEQ ID NO: 6302 - DNA, 20 bp, Homo sapiens
ccagaccaacctgacccacc

SEQ ID NO: 6303 - DNA, 20 bp, Homo sapiens
ggggtttcaccaggtgggtc

SEQ ID NO: 6304 - DNA, 20 bp, Homo sapiens
tttcaccaggtgggtcaggt

SEQ ID NO: 6305 - DNA, 20 bp, Homo sapiens
ccaggtgggtcaggttggtc

SEQ ID NO: 6306 - DNA, 20 bp, Homo sapiens
caggtggatcacttgaggtc

SEQ ID NO: 6307 - DNA, 20 bp, Homo sapiens
gcaggtggatcacttgaggt

SEQ ID NO: 6308 - DNA, 20 bp, Homo sapiens
ctaggcaggtggatcacttg

SEQ ID NO: 6309 - DNA, 20 bp, Homo sapiens
ctttgggaggcctaggcagg

SEQ ID NO: 6310 - DNA, 20 bp, Homo sapiens
ctcaagtgatccacctgcct

SEQ ID NO: 6311 - DNA, 20 bp, Homo sapiens
gtactttgggaggcctaggc

SEQ ID NO: 6312 - DNA, 20 bp, Homo sapiens
cccagtactttgggaggcct

SEQ ID NO: 6313 - DNA, 20 bp, Homo sapiens
tgtaatcccagtactttggg

SEQ ID NO: 6314 - DNA, 20 bp, Homo sapiens
gcctgtaatcccagtacttt

SEQ ID NO: 6315 - DNA, 20 bp, Homo sapiens
gcctaggcctcccaaagtac

SEQ ID NO: 6316 - DNA, 20 bp, Homo sapiens
cgcctgtaatcccagtactt

SEQ ID NO: 6317 - DNA, 20 bp, Homo sapiens
cctaggcctcccaaagtact

SEQ ID NO: 6318 - DNA, 20 bp, Homo sapiens
tcccaaagtactgggattac

SEQ ID NO: 6319 - DNA, 20 bp, Homo sapiens
cagttttaggctggacacag

SEQ ID NO: 6320 - DNA, 20 bp, Homo sapiens
tctcaaaaacagttttaggc

SEQ ID NO: 6321 - DNA, 20 bp, Homo sapiens
cctgtctcaaaaacagtttt

SEQ ID NO: 6322 - DNA, 20 bp, Homo sapiens
cctaaaactgtttttgagac

SEQ ID NO: 6323 - DNA, 20 bp, Homo sapiens
ctaaaactgtttttgagaca

SEQ ID NO: 6324 - DNA, 20 bp, Homo sapiens
agggtctcactctgttgtcc

SEQ ID NO: 6325 - DNA, 20 bp, Homo sapiens
tctcactctgttgtccaggc

SEQ ID NO: 6326 - DNA, 20 bp, Homo sapiens
catgccacttcactccagcc

SEQ ID NO: 6327 - DNA, 20 bp, Homo sapiens
ttgtccaggctggagtgaag

SEQ ID NO: 6328 - DNA, 20 bp, Homo sapiens
ggagtgaagtggcatgttca

SEQ ID NO: 6329 - DNA, 20 bp, Homo sapiens
acctgaacccagtgaggttg

SEQ ID NO: 6330 - DNA, 20 bp, Homo sapiens
tcactcagcctcaacctcac

SEQ ID NO: 6331 - DNA, 20 bp, Homo sapiens
cactcagcctcaacctcact

SEQ ID NO: 6332 - DNA, 20 bp, Homo sapiens
aggatcacctgaacccagtg

SEQ ID NO: 6333 - DNA, 20 bp, Homo sapiens
gcctcaacctcactgggttc

SEQ ID NO: 6334 - DNA, 20 bp, Homo sapiens
acttgggaggctgaggcagg

SEQ ID NO: 6335 - DNA, 20 bp, Homo sapiens
gctacttgggaggctgaggc

SEQ ID NO: 6336 - DNA, 20 bp, Homo sapiens
cccagctacttgggaggctg

SEQ ID NO: 6337 - DNA, 20 bp, Homo sapiens
cacagtcccagctacttggg

SEQ ID NO: 6338 - DNA, 20 bp, Homo sapiens
acccacagtcccagctactt

SEQ ID NO: 6339 - DNA, 20 bp, Homo sapiens
gcctcagcctcccaagtagc

SEQ ID NO: 6340 - DNA, 20 bp, Homo sapiens
cacccacagtcccagctact

SEQ ID NO: 6341 - DNA, 20 bp, Homo sapiens
cctcagcctcccaagtagct

SEQ ID NO: 6342 - DNA, 20 bp, Homo sapiens
ctcccaagtagctgggactg

SEQ ID NO: 6343 - DNA, 20 bp, Homo sapiens
tcccaagtagctgggactgt

SEQ ID NO: 6344 - DNA, 20 bp, Homo sapiens
gaaaaatcagctaggcgtgg

SEQ ID NO: 6345 - DNA, 20 bp, Homo sapiens
atagaaaaatcagctaggcg

SEQ ID NO: 6346 - DNA, 20 bp, Homo sapiens
agaaaatagaaaaatcagct

SEQ ID NO: 6347 - DNA, 20 bp, Homo sapiens
tttctattttctgcagagac

SEQ ID NO: 6348 - DNA, 20 bp, Homo sapiens
ccagcctgagcaacacagtg

SEQ ID NO: 6349 - DNA, 20 bp, Homo sapiens
aggacctcactgtgttgctc

SEQ ID NO: 6350 - DNA, 20 bp, Homo sapiens
cctcactgtgttgctcaggc

SEQ ID NO: 6351 - DNA, 20 bp, Homo sapiens
tcaggctggtctcaaactcc

SEQ ID NO: 6352 - DNA, 20 bp, Homo sapiens
caggctggtctcaaactcct

SEQ ID NO: 6353 - DNA, 20 bp, Homo sapiens
tgggcagatcacttgagccc

SEQ ID NO: 6354 - DNA, 20 bp, Homo sapiens
ctcaagtgatctgcccacct

SEQ ID NO: 6355 - DNA, 20 bp, Homo sapiens
gtacttttcagagccgaggt

SEQ ID NO: 6356 - DNA, 20 bp, Homo sapiens
agtacttttcagagccgagg

SEQ ID NO: 6357 - DNA, 20 bp, Homo sapiens
tccagtacttttcagagccg

SEQ ID NO: 6358 - DNA, 20 bp, Homo sapiens
acctcggctctgaaaagtac

SEQ ID NO: 6359 - DNA, 20 bp, Homo sapiens
tgtggtctcagctactcagg

SEQ ID NO: 6360 - DNA, 20 bp, Homo sapiens
gcctgtggtctcagctactc

SEQ ID NO: 6361 - DNA, 20 bp, Homo sapiens
tcctgagtagctgagaccac

SEQ ID NO: 6362 - DNA, 20 bp, Homo sapiens
ggtgtggtggtgtgtgcctg

SEQ ID NO: 6363 - DNA, 20 bp, Homo sapiens
aaaaaaaaagctaggtgtgg

SEQ ID NO: 6364 - DNA, 20 bp, Homo sapiens
aaaaaaaaaaaagctaggtg

SEQ ID NO: 6365 - DNA, 20 bp, Homo sapiens
aagcaaaaaaaaaaaaagct

SEQ ID NO: 6366 - DNA, 20 bp, Homo sapiens
ttttttgctttttgtagaga

SEQ ID NO: 6367 - DNA, 20 bp, Homo sapiens
ggagtctcactatgttgccc

SEQ ID NO: 6368 - DNA, 20 bp, Homo sapiens
tctcactatgttgcccaggc

SEQ ID NO: 6369 - DNA, 20 bp, Homo sapiens
ctggagtttgagaccagcct

SEQ ID NO: 6370 - DNA, 20 bp, Homo sapiens
cctggagtttgagaccagcc

SEQ ID NO: 6371 - DNA, 20 bp, Homo sapiens
ccaggctggtctcaaactcc

SEQ ID NO: 6372 - DNA, 20 bp, Homo sapiens
tgggaggattgcttaaggcc

SEQ ID NO: 6373 - DNA, 20 bp, Homo sapiens
tgaggtgggaggattgctta

SEQ ID NO: 6374 - DNA, 20 bp, Homo sapiens
ctttgggaggctgaggtggg

SEQ ID NO: 6375 - DNA, 20 bp, Homo sapiens
gcactttgggaggctgaggt

SEQ ID NO: 6376 - DNA, 20 bp, Homo sapiens
cgcactttgggaggctgagg

SEQ ID NO: 6377 - DNA, 20 bp, Homo sapiens
cttcgcactttgggaggctg

SEQ ID NO: 6378 - DNA, 20 bp, Homo sapiens
tgtaatcttcgcactttggg

SEQ ID NO: 6379 - DNA, 20 bp, Homo sapiens
acctgtaatcttcgcacttt

SEQ ID NO: 6380 - DNA, 20 bp, Homo sapiens
cacctgtaatcttcgcactt

SEQ ID NO: 6381 - DNA, 20 bp, Homo sapiens
tcccaaagtgcgaagattac

SEQ ID NO: 6382 - DNA, 20 bp, Homo sapiens
acttttaaggccaggaatgg

SEQ ID NO: 6383 - DNA, 20 bp, Homo sapiens
caggtgtgagccaccattcc

SEQ ID NO: 6384 - DNA, 20 bp, Homo sapiens
cacacttttaaggccaggaa

SEQ ID NO: 6385 - DNA, 20 bp, Homo sapiens
aatatcacacttttaaggcc

SEQ ID NO: 6386 - DNA, 20 bp, Homo sapiens
ttaaaaatatcacactttta

SEQ ID NO: 6387 - DNA, 20 bp, Homo sapiens
taatgtattttgaaatctgc

SEQ ID NO: 6388 - DNA, 20 bp, Homo sapiens
gttattgctattatcttcta

SEQ ID NO: 6389 - DNA, 20 bp, Homo sapiens
ggttattgctattatcttct

SEQ ID NO: 6390 - DNA, 20 bp, Homo sapiens
gtcaagcacaataaaggagt

SEQ ID NO: 6391 - DNA, 20 bp, Homo sapiens
atatacgtcaagcacaataa

SEQ ID NO: 6392 - DNA, 20 bp, Homo sapiens
aactcactttgcccttaccg

SEQ ID NO: 6393 - DNA, 20 bp, Homo sapiens
tgcctctggagccacggtaa

SEQ ID NO: 6394 - DNA, 20 bp, Homo sapiens
atgcctctggagccacggta

SEQ ID NO: 6395 - DNA, 20 bp, Homo sapiens
acccaatgcctctggagcca

SEQ ID NO: 6396 - DNA, 20 bp, Homo sapiens
tgcccttaccgtggctccag

SEQ ID NO: 6397 - DNA, 20 bp, Homo sapiens
taaggtggacccaatgcctc

SEQ ID NO: 6398 - DNA, 20 bp, Homo sapiens
taccgtggctccagaggcat

SEQ ID NO: 6399 - DNA, 20 bp, Homo sapiens
accgtggctccagaggcatt

SEQ ID NO: 6400 - DNA, 20 bp, Homo sapiens
tggtgcctccatttataagg

SEQ ID NO: 6401 - DNA, 20 bp, Homo sapiens
cattgggtccaccttataaa

SEQ ID NO: 6402 - DNA, 20 bp, Homo sapiens
ccttggtgcctccatttata

SEQ ID NO: 6403 - DNA, 20 bp, Homo sapiens
tgggtccaccttataaatgg

SEQ ID NO: 6404 - DNA, 20 bp, Homo sapiens
ccttataaatggaggcacca

SEQ ID NO: 6405 - DNA, 20 bp, Homo sapiens
tatttaatcactctgtgcct

SEQ ID NO: 6406 - DNA, 20 bp, Homo sapiens
agtgattaaataaattgccc

SEQ ID NO: 6407 - DNA, 20 bp, Homo sapiens
ctttctggctgtgtgatcct

SEQ ID NO: 6408 - DNA, 20 bp, Homo sapiens
actttctggctgtgtgatcc

SEQ ID NO: 6409 - DNA, 20 bp, Homo sapiens
atcttgactcagacactttc

SEQ ID NO: 6410 - DNA, 20 bp, Homo sapiens
ctgagtcaagattccagccc

SEQ ID NO: 6411 - DNA, 20 bp, Homo sapiens
caggtctaggctgcctgggc

SEQ ID NO: 6412 - DNA, 20 bp, Homo sapiens
ctctcaggtctaggctgcct

SEQ ID NO: 6413 - DNA, 20 bp, Homo sapiens
gctctcaggtctaggctgcc

SEQ ID NO: 6414 - DNA, 20 bp, Homo sapiens
aggagcgtgctctcaggtct

SEQ ID NO: 6415 - DNA, 20 bp, Homo sapiens
gtggttaggagcgtgctctc

SEQ ID NO: 6416 - DNA, 20 bp, Homo sapiens
gacagtgatgtgcagtggtt

SEQ ID NO: 6417 - DNA, 20 bp, Homo sapiens
gctaagacagtgatgtgcag

SEQ ID NO: 6418 - DNA, 20 bp, Homo sapiens
agggccagtttgtgctgagg

SEQ ID NO: 6419 - DNA, 20 bp, Homo sapiens
tcaagggccagtttgtgctg

SEQ ID NO: 6420 - DNA, 20 bp, Homo sapiens
agcacctcctcagcacaaac

SEQ ID NO: 6421 - DNA, 20 bp, Homo sapiens
tcagcacaaactggcccttg

SEQ ID NO: 6422 - DNA, 20 bp, Homo sapiens
ggcggtatttcattcctcaa

SEQ ID NO: 6423 - DNA, 20 bp, Homo sapiens
cggcggtatttcattcctca

SEQ ID NO: 6424 - DNA, 20 bp, Homo sapiens
gaggaatgaaataccgccgc

SEQ ID NO: 6425 - DNA, 20 bp, Homo sapiens
aggagcgtgtgtgccggcgg

SEQ ID NO: 6426 - DNA, 20 bp, Homo sapiens
ctcaggagcgtgtgtgccgg

SEQ ID NO: 6427 - DNA, 20 bp, Homo sapiens
taactcaggagcgtgtgtgc

SEQ ID NO: 6428 - DNA, 20 bp, Homo sapiens
cattgacaaaggcttaactc

SEQ ID NO: 6429 - DNA, 20 bp, Homo sapiens
ggtgttcatttcattgacaa

SEQ ID NO: 6430 - DNA, 20 bp, Homo sapiens
acaggttattccttttaagt

SEQ ID NO: 6431 - DNA, 20 bp, Homo sapiens
gaaatgaacacccacttaaa

SEQ ID NO: 6432 - DNA, 20 bp, Homo sapiens
gacaggttattccttttaag

SEQ ID NO: 6433 - DNA, 20 bp, Homo sapiens
ttaaaaggaataacctgtcc

SEQ ID NO: 6434 - DNA, 20 bp, Homo sapiens
atgttccatcgtgcctggac

SEQ ID NO: 6435 - DNA, 20 bp, Homo sapiens
actcaatgttccatcgtgcc

SEQ ID NO: 6436 - DNA, 20 bp, Homo sapiens
aataacctgtccaggcacga

SEQ ID NO: 6437 - DNA, 20 bp, Homo sapiens
gaccaggaatttagaataag

SEQ ID NO: 6438 - DNA, 20 bp, Homo sapiens
ggaccaggaatttagaataa

SEQ ID NO: 6439 - DNA, 20 bp, Homo sapiens
gggaccaggaatttagaata

SEQ ID NO: 6440 - DNA, 20 bp, Homo sapiens
aaccccttattctaaattcc

SEQ ID NO: 6441 - DNA, 20 bp, Homo sapiens
gaaggagtcttacagggacc

SEQ ID NO: 6442 - DNA, 20 bp, Homo sapiens
catggggaaggagtcttaca

SEQ ID NO: 6443 - DNA, 20 bp, Homo sapiens
gcatggggaaggagtcttac

SEQ ID NO: 6444 - DNA, 20 bp, Homo sapiens
aaagggcaagggcatgggga

SEQ ID NO: 6445 - DNA, 20 bp, Homo sapiens
cagaaaagggcaagggcatg

SEQ ID NO: 6446 - DNA, 20 bp, Homo sapiens
tcagaaaagggcaagggcat

SEQ ID NO: 6447 - DNA, 20 bp, Homo sapiens
gtcagaaaagggcaagggca

SEQ ID NO: 6448 - DNA, 20 bp, Homo sapiens
ggaaggtcagaaaagggcaa

SEQ ID NO: 6449 - DNA, 20 bp, Homo sapiens
gggaaggtcagaaaagggca

SEQ ID NO: 6450 - DNA, 20 bp, Homo sapiens
tttaggggaaggtcagaaaa

SEQ ID NO: 6451 - DNA, 20 bp, Homo sapiens
ctttaggggaaggtcagaaa

SEQ ID NO: 6452 - DNA, 20 bp, Homo sapiens
gcctcaaggactttagggga

SEQ ID NO: 6453 - DNA, 20 bp, Homo sapiens
ttaagcctcaaggactttag

SEQ ID NO: 6454 - DNA, 20 bp, Homo sapiens
cttaagcctcaaggacttta

SEQ ID NO: 6455 - DNA, 20 bp, Homo sapiens
gcttaagcctcaaggacttt

SEQ ID NO: 6456 - DNA, 20 bp, Homo sapiens
accttcccctaaagtccttg

SEQ ID NO: 6457 - DNA, 20 bp, Homo sapiens
ctatgcccgcttaagcctca

SEQ ID NO: 6458 - DNA, 20 bp, Homo sapiens
taaagtccttgaggcttaag

SEQ ID NO: 6459 - DNA, 20 bp, Homo sapiens
aaagtccttgaggcttaagc

SEQ ID NO: 6460 - DNA, 20 bp, Homo sapiens
gcatagtctgcagcaaacac

SEQ ID NO: 6461 - DNA, 20 bp, Homo sapiens
catagtctgcagcaaacact

SEQ ID NO: 6462 - DNA, 20 bp, Homo sapiens
atagtctgcagcaaacactg

SEQ ID NO: 6463 - DNA, 20 bp, Homo sapiens
aaagcctgtgctctgaagtc

SEQ ID NO: 6464 - DNA, 20 bp, Homo sapiens
gagtccagacttcagagcac

SEQ ID NO: 6465 - DNA, 20 bp, Homo sapiens
agacttcagagcacaggctt

SEQ ID NO: 6466 - DNA, 20 bp, Homo sapiens
agagcacaggctttggatct

SEQ ID NO: 6467 - DNA, 20 bp, Homo sapiens
ggctttggatctaggccagc

SEQ ID NO: 6468 - DNA, 20 bp, Homo sapiens
atgtgaggttcaaatccagc

SEQ ID NO: 6469 - DNA, 20 bp, Homo sapiens
gccagctgatcacaaatgtg

SEQ ID NO: 6470 - DNA, 20 bp, Homo sapiens
acctcacatttgtgatcagc

SEQ ID NO: 6471 - DNA, 20 bp, Homo sapiens
gaggattaaaatggactttt

SEQ ID NO: 6472 - DNA, 20 bp, Homo sapiens
ggtcacgtagaggattaaaa

SEQ ID NO: 6473 - DNA, 20 bp, Homo sapiens
ttttacagagggtcacgtag

SEQ ID NO: 6474 - DNA, 20 bp, Homo sapiens
tcagtatcccattttacaga

SEQ ID NO: 6475 - DNA, 20 bp, Homo sapiens
ttcagtatcccattttacag

SEQ ID NO: 6476 - DNA, 20 bp, Homo sapiens
ctacgtgaccctctgtaaaa

SEQ ID NO: 6477 - DNA, 20 bp, Homo sapiens
tacgtgaccctctgtaaaat

SEQ ID NO: 6478 - DNA, 20 bp, Homo sapiens
ctgtaaaatgggatactgaa

SEQ ID NO: 6479 - DNA, 20 bp, Homo sapiens
attttttttgtgtgtgtgtg

SEQ ID NO: 6480 - DNA, 20 bp, Homo sapiens
gcagtcttactctgttgccc

SEQ ID NO: 6481 - DNA, 20 bp, Homo sapiens
tcttactctgttgcccaggc

SEQ ID NO: 6482 - DNA, 20 bp, Homo sapiens
gcaccactgcactccagcct

SEQ ID NO: 6483 - DNA, 20 bp, Homo sapiens
tgcaccactgcactccagcc

SEQ ID NO: 6484 - DNA, 20 bp, Homo sapiens
ttgcccaggctggagtgcag

SEQ ID NO: 6485 - DNA, 20 bp, Homo sapiens
ggagtgcagtggtgcagtct

SEQ ID NO: 6486 - DNA, 20 bp, Homo sapiens
cgggaggcagaggtttcagt

SEQ ID NO: 6487 - DNA, 20 bp, Homo sapiens
ccgggaggcagaggtttcag

SEQ ID NO: 6488 - DNA, 20 bp, Homo sapiens
cgcttgaacccgggaggcag

SEQ ID NO: 6489 - DNA, 20 bp, Homo sapiens
ccactgaaacctctgcctcc

SEQ ID NO: 6490 - DNA, 20 bp, Homo sapiens
cactgaaacctctgcctccc

SEQ ID NO: 6491 - DNA, 20 bp, Homo sapiens
ggcagtcgcttgaacccggg

SEQ ID NO: 6492 - DNA, 20 bp, Homo sapiens
catggcagtcgcttgaaccc

SEQ ID NO: 6493 - DNA, 20 bp, Homo sapiens
gcatggcagtcgcttgaacc

SEQ ID NO: 6494 - DNA, 20 bp, Homo sapiens
ccactctcgaggctgaggca

SEQ ID NO: 6495 - DNA, 20 bp, Homo sapiens
cccagccactctcgaggctg

SEQ ID NO: 6496 - DNA, 20 bp, Homo sapiens
ccatgcctcagcctcgagag

SEQ ID NO: 6497 - DNA, 20 bp, Homo sapiens
tgtaatcccagccactctcg

SEQ ID NO: 6498 - DNA, 20 bp, Homo sapiens
gcctcagcctcgagagtggc

SEQ ID NO: 6499 - DNA, 20 bp, Homo sapiens
cctcagcctcgagagtggct

SEQ ID NO: 6500 - DNA, 20 bp, Homo sapiens
caaaaattacccgggcatgg

SEQ ID NO: 6501 - DNA, 20 bp, Homo sapiens
caagcatgcaccaccatgcc

SEQ ID NO: 6502 - DNA, 20 bp, Homo sapiens
aagcatgcaccaccatgccc

SEQ ID NO: 6503 - DNA, 20 bp, Homo sapiens
atacaaaaattacccgggca

SEQ ID NO: 6504 - DNA, 20 bp, Homo sapiens
taaaaatacaaaaattaccc

SEQ ID NO: 6505 - DNA, 20 bp, Homo sapiens
ctaaaaatacaaaaattacc

SEQ ID NO: 6506 - DNA, 20 bp, Homo sapiens
gagacagagtttcaccatgt

SEQ ID NO: 6507 - DNA, 20 bp, Homo sapiens
caagagtggcctggccaaca

SEQ ID NO: 6508 - DNA, 20 bp, Homo sapiens
agagtttcaccatgttggcc

SEQ ID NO: 6509 - DNA, 20 bp, Homo sapiens
ccaggggttcaagagtggcc

SEQ ID NO: 6510 - DNA, 20 bp, Homo sapiens
tgaggccaggggttcaagag

SEQ ID NO: 6511 - DNA, 20 bp, Homo sapiens
ccaggccactcttgaacccc

SEQ ID NO: 6512 - DNA, 20 bp, Homo sapiens
ggtggatcacttgaggccag

SEQ ID NO: 6513 - DNA, 20 bp, Homo sapiens
aggtggatcacttgaggcca

SEQ ID NO: 6514 - DNA, 20 bp, Homo sapiens
caggtggatcacttgaggcc

SEQ ID NO: 6515 - DNA, 20 bp, Homo sapiens
caaggcaggtggatcacttg

SEQ ID NO: 6516 - DNA, 20 bp, Homo sapiens
ctttgggaggccaaggcagg

SEQ ID NO: 6517 - DNA, 20 bp, Homo sapiens
ctcaagtgatccacctgcct

SEQ ID NO: 6518 - DNA, 20 bp, Homo sapiens
gcactttgggaggccaaggc

SEQ ID NO: 6519 - DNA, 20 bp, Homo sapiens
cccagcactttgggaggcca

SEQ ID NO: 6520 - DNA, 20 bp, Homo sapiens
tgtactcccagcactttggg

SEQ ID NO: 6521 - DNA, 20 bp, Homo sapiens
gcctgtactcccagcacttt

SEQ ID NO: 6522 - DNA, 20 bp, Homo sapiens
gccttggcctcccaaagtgc

SEQ ID NO: 6523 - DNA, 20 bp, Homo sapiens
tgcctgtactcccagcactt

SEQ ID NO: 6524 - DNA, 20 bp, Homo sapiens
ccttggcctcccaaagtgct

SEQ ID NO: 6525 - DNA, 20 bp, Homo sapiens
tcccaaagtgctgggagtac

SEQ ID NO: 6526 - DNA, 20 bp, Homo sapiens
ccctataaggctgggtgcag

SEQ ID NO: 6527 - DNA, 20 bp, Homo sapiens
aattttaaccctataaggct

SEQ ID NO: 6528 - DNA, 20 bp, Homo sapiens
aaattttaaccctataaggc

SEQ ID NO: 6529 - DNA, 20 bp, Homo sapiens
gccactgcacccagccttat

SEQ ID NO: 6530 - DNA, 20 bp, Homo sapiens
ccactgcacccagccttata

SEQ ID NO: 6531 - DNA, 20 bp, Homo sapiens
ttttaaattttaaccctata

SEQ ID NO: 6532 - DNA, 20 bp, Homo sapiens
atagggttaaaatttaaaag

SEQ ID NO: 6533 - DNA, 20 bp, Homo sapiens
ataagagcattttgtaaaac

SEQ ID NO: 6534 - DNA, 20 bp, Homo sapiens
cattatcatcactgttgctg

SEQ ID NO: 6535 - DNA, 20 bp, Homo sapiens
tcatcatcattaactcccag

SEQ ID NO: 6536 - DNA, 20 bp, Homo sapiens
catcatcattaactcccaga

SEQ ID NO: 6537 - DNA, 20 bp, Homo sapiens
catcattaactcccagaggg

SEQ ID NO: 6538 - DNA, 20 bp, Homo sapiens
tgagactccctcctccctct

SEQ ID NO: 6539 - DNA, 20 bp, Homo sapiens
ctgagactccctcctccctc

SEQ ID NO: 6540 - DNA, 20 bp, Homo sapiens
cattaactcccagagggagg

SEQ ID NO: 6541 - DNA, 20 bp, Homo sapiens
attaactcccagagggagga

SEQ ID NO: 6542 - DNA, 20 bp, Homo sapiens
agtctcagagcaagctgctc

SEQ ID NO: 6543 - DNA, 20 bp, Homo sapiens
gtctcagagcaagctgctca

SEQ ID NO: 6544 - DNA, 20 bp, Homo sapiens
tctcagagcaagctgctcag

SEQ ID NO: 6545 - DNA, 20 bp, Homo sapiens
gcaagctgctcaggggagac

SEQ ID NO: 6546 - DNA, 20 bp, Homo sapiens
caggggagactggatgtcca

SEQ ID NO: 6547 - DNA, 20 bp, Homo sapiens
gtactgagctggacaatcca

SEQ ID NO: 6548 - DNA, 20 bp, Homo sapiens
tggaggaagtggtactgagc

SEQ ID NO: 6549 - DNA, 20 bp, Homo sapiens
ggaggacttcctggaggaag

SEQ ID NO: 6550 - DNA, 20 bp, Homo sapiens
agctcagtaccacttcctcc

SEQ ID NO: 6551 - DNA, 20 bp, Homo sapiens
tatcagggaggacttcctgg

SEQ ID NO: 6552 - DNA, 20 bp, Homo sapiens
acttatcagggaggacttcc

SEQ ID NO: 6553 - DNA, 20 bp, Homo sapiens
gctgactggacttatcaggg

SEQ ID NO: 6554 - DNA, 20 bp, Homo sapiens
gatgctgactggacttatca

SEQ ID NO: 6555 - DNA, 20 bp, Homo sapiens
tgatgctgactggacttatc

SEQ ID NO: 6556 - DNA, 20 bp, Homo sapiens
aaggagagggtgatgctgac

SEQ ID NO: 6557 - DNA, 20 bp, Homo sapiens
tggggttcattggaaggaga

SEQ ID NO: 6558 - DNA, 20 bp, Homo sapiens
gtggggttcattggaaggag

SEQ ID NO: 6559 - DNA, 20 bp, Homo sapiens
ggctagtggggttcattgga

SEQ ID NO: 6560 - DNA, 20 bp, Homo sapiens
acaaggctagtggggttcat

SEQ ID NO: 6561 - DNA, 20 bp, Homo sapiens
gtgatatcacaaggctagtg

SEQ ID NO: 6562 - DNA, 20 bp, Homo sapiens
tgtgatatcacaaggctagt

SEQ ID NO: 6563 - DNA, 20 bp, Homo sapiens
ctgtgatatcacaaggctag

SEQ ID NO: 6564 - DNA, 20 bp, Homo sapiens
agaatatctgtgatatcaca

SEQ ID NO: 6565 - DNA, 20 bp, Homo sapiens
cacagatattcttagttgac

SEQ ID NO: 6566 - DNA, 20 bp, Homo sapiens
attcttagttgacaggctca

SEQ ID NO: 6567 - DNA, 20 bp, Homo sapiens
aatgtacttatgatctagac

SEQ ID NO: 6568 - DNA, 20 bp, Homo sapiens
aagtacattttttttttttt

SEQ ID NO: 6569 - DNA, 20 bp, Homo sapiens
tcaggagtagaaaattattt

SEQ ID NO: 6570 - DNA, 20 bp, Homo sapiens
tttgaccaatgagcatgctc

SEQ ID NO: 6571 - DNA, 20 bp, Homo sapiens
ctactcctgagcatgctcat

SEQ ID NO: 6572 - DNA, 20 bp, Homo sapiens
tgagcatgctcattggtcaa

SEQ ID NO: 6573 - DNA, 20 bp, Homo sapiens
catgctcattggtcaaagga

SEQ ID NO: 6574 - DNA, 20 bp, Homo sapiens
ctcattggtcaaaggaagga

SEQ ID NO: 6575 - DNA, 20 bp, Homo sapiens
gaatcataatagcgttaata

SEQ ID NO: 6576 - DNA, 20 bp, Homo sapiens
gctagcgtcttttcagaagt

SEQ ID NO: 6577 - DNA, 20 bp, Homo sapiens
ttggttctttgtgccagtct

SEQ ID NO: 6578 - DNA, 20 bp, Homo sapiens
ggtgtgtctagcaccaagac

SEQ ID NO: 6579 - DNA, 20 bp, Homo sapiens
ttggtgctagacacaccgat

SEQ ID NO: 6580 - DNA, 20 bp, Homo sapiens
tgaaggagtattcttcctat

SEQ ID NO: 6581 - DNA, 20 bp, Homo sapiens
ttggtgtcctggggatgtga

SEQ ID NO: 6582 - DNA, 20 bp, Homo sapiens
gaatactccttcacatcccc

SEQ ID NO: 6583 - DNA, 20 bp, Homo sapiens
tatcccatgttggtgtcctg

SEQ ID NO: 6584 - DNA, 20 bp, Homo sapiens
gtatcccatgttggtgtcct

SEQ ID NO: 6585 - DNA, 20 bp, Homo sapiens
cgtatcccatgttggtgtcc

SEQ ID NO: 6586 - DNA, 20 bp, Homo sapiens
acatccccaggacaccaaca

SEQ ID NO: 6587 - DNA, 20 bp, Homo sapiens
catccccaggacaccaacat

SEQ ID NO: 6588 - DNA, 20 bp, Homo sapiens
tgatcaaacgtatcccatgt

SEQ ID NO: 6589 - DNA, 20 bp, Homo sapiens
catcattcttaatttgcaga

SEQ ID NO: 6590 - DNA, 20 bp, Homo sapiens
taatttgcagaaggagaaat

SEQ ID NO: 6591 - DNA, 20 bp, Homo sapiens
agatgaaatagccactccag

SEQ ID NO: 6592 - DNA, 20 bp, Homo sapiens
tcccagccttgccactggag

SEQ ID NO: 6593 - DNA, 20 bp, Homo sapiens
aaatagccactccagtggca

SEQ ID NO: 6594 - DNA, 20 bp, Homo sapiens
tccagtcccagccttgccac

SEQ ID NO: 6595 - DNA, 20 bp, Homo sapiens
agccactccagtggcaaggc

SEQ ID NO: 6596 - DNA, 20 bp, Homo sapiens
gccactccagtggcaaggct

SEQ ID NO: 6597 - DNA, 20 bp, Homo sapiens
tccagtggcaaggctgggac

SEQ ID NO: 6598 - DNA, 20 bp, Homo sapiens
gcaaggctgggactggaagc

SEQ ID NO: 6599 - DNA, 20 bp, Homo sapiens
caaggctgggactggaagcc

SEQ ID NO: 6600 - DNA, 20 bp, Homo sapiens
atttggaatcaggacaagcc

SEQ ID NO: 6601 - DNA, 20 bp, Homo sapiens
aagaaactggatttggaatc

SEQ ID NO: 6602 - DNA, 20 bp, Homo sapiens
cagtggaaagaaactggatt

SEQ ID NO: 6603 - DNA, 20 bp, Homo sapiens
ccgtggcagtggaaagaaac

SEQ ID NO: 6604 - DNA, 20 bp, Homo sapiens
ccagtttctttccactgcca

SEQ ID NO: 6605 - DNA, 20 bp, Homo sapiens
tctctccgtctccgtggcag

SEQ ID NO: 6606 - DNA, 20 bp, Homo sapiens
tctttccactgccacggaga

SEQ ID NO: 6607 - DNA, 20 bp, Homo sapiens
gtcccttctctccgtctccg

SEQ ID NO: 6608 - DNA, 20 bp, Homo sapiens
ctgccacggagacggagaga

SEQ ID NO: 6609 - DNA, 20 bp, Homo sapiens
tgccacggagacggagagaa

SEQ ID NO: 6610 - DNA, 20 bp, Homo sapiens
gagacggagagaagggacag

SEQ ID NO: 6611 - DNA, 20 bp, Homo sapiens
gaagggacagtggccccaga

SEQ ID NO: 6612 - DNA, 20 bp, Homo sapiens
aagggacagtggccccagat

SEQ ID NO: 6613 - DNA, 20 bp, Homo sapiens
agggacagtggccccagatg

SEQ ID NO: 6614 - DNA, 20 bp, Homo sapiens
agtcaccccatccccatctg

SEQ ID NO: 6615 - DNA, 20 bp, Homo sapiens
cagtcaccccatccccatct

SEQ ID NO: 6616 - DNA, 20 bp, Homo sapiens
ccagtcaccccatccccatc

SEQ ID NO: 6617 - DNA, 20 bp, Homo sapiens
acagtggccccagatgggga

SEQ ID NO: 6618 - DNA, 20 bp, Homo sapiens
cagtggccccagatggggat

SEQ ID NO: 6619 - DNA, 20 bp, Homo sapiens
agtggccccagatggggatg

SEQ ID NO: 6620 - DNA, 20 bp, Homo sapiens
ccagatggggatggggtgac

SEQ ID NO: 6621 - DNA, 20 bp, Homo sapiens
ggggatggggtgactggatg

SEQ ID NO: 6622 - DNA, 20 bp, Homo sapiens
gggatggggtgactggatgt

SEQ ID NO: 6623 - DNA, 20 bp, Homo sapiens
tggggtgactggatgtgggc

SEQ ID NO: 6624 - DNA, 20 bp, Homo sapiens
actggatgtgggcaggcctg

SEQ ID NO: 6625 - DNA, 20 bp, Homo sapiens
ctggatgtgggcaggcctgc

SEQ ID NO: 6626 - DNA, 20 bp, Homo sapiens
tggatgtgggcaggcctgcg

SEQ ID NO: 6627 - DNA, 20 bp, Homo sapiens
ggatgtgggcaggcctgcgg

SEQ ID NO: 6628 - DNA, 20 bp, Homo sapiens
agagggcactcttcccccgc

SEQ ID NO: 6629 - DNA, 20 bp, Homo sapiens
tcattcggatgctcaacaga

SEQ ID NO: 6630 - DNA, 20 bp, Homo sapiens
atcattcggatgctcaacag

SEQ ID NO: 6631 - DNA, 20 bp, Homo sapiens
tctgttgagcatccgaatga

SEQ ID NO: 6632 - DNA, 20 bp, Homo sapiens
tcttttctgctgccatcatt

SEQ ID NO: 6633 - DNA, 20 bp, Homo sapiens
atggcagcagaaaagaagac

SEQ ID NO: 6634 - DNA, 20 bp, Homo sapiens
tggcagcagaaaagaagact

SEQ ID NO: 6635 - DNA, 20 bp, Homo sapiens
cctcaggggatctgataact

SEQ ID NO: 6636 - DNA, 20 bp, Homo sapiens
ccctcaggggatctgataac

SEQ ID NO: 6637 - DNA, 20 bp, Homo sapiens
cccagttatcagatcccctg

SEQ ID NO: 6638 - DNA, 20 bp, Homo sapiens
ccagttatcagatcccctga

SEQ ID NO: 6639 - DNA, 20 bp, Homo sapiens
cggggtgactgttccctcag

SEQ ID NO: 6640 - DNA, 20 bp, Homo sapiens
tcggggtgactgttccctca

SEQ ID NO: 6641 - DNA, 20 bp, Homo sapiens
atcggggtgactgttccctc

SEQ ID NO: 6642 - DNA, 20 bp, Homo sapiens
catctgactgagggtgatcg

SEQ ID NO: 6643 - DNA, 20 bp, Homo sapiens
tcatctgactgagggtgatc

SEQ ID NO: 6644 - DNA, 20 bp, Homo sapiens
ctcatctgactgagggtgat

SEQ ID NO: 6645 - DNA, 20 bp, Homo sapiens
acacacactcatctgactga

SEQ ID NO: 6646 - DNA, 20 bp, Homo sapiens
tacacacactcatctgactg

SEQ ID NO: 6647 - DNA, 20 bp, Homo sapiens
cctcagtgccttcatctatg

SEQ ID NO: 6648 - DNA, 20 bp, Homo sapiens
gatcaatgcctcatagatga

SEQ ID NO: 6649 - DNA, 20 bp, Homo sapiens
cctcatagatgaaggcactg

SEQ ID NO: 6650 - DNA, 20 bp, Homo sapiens
gaaggcactgaggcacagag

SEQ ID NO: 6651 - DNA, 20 bp, Homo sapiens
gcaccctgagccatgtggtc

SEQ ID NO: 6652 - DNA, 20 bp, Homo sapiens
aagtcatctgccagaccaca

SEQ ID NO: 6653 - DNA, 20 bp, Homo sapiens
cctctgcaccctgagccatg

SEQ ID NO: 6654 - DNA, 20 bp, Homo sapiens
tctgccagaccacatggctc

SEQ ID NO: 6655 - DNA, 20 bp, Homo sapiens
ctgccagaccacatggctca

SEQ ID NO: 6656 - DNA, 20 bp, Homo sapiens
ccacatggctcagggtgcag

SEQ ID NO: 6657 - DNA, 20 bp, Homo sapiens
gggtgcagaggccaccttaa

SEQ ID NO: 6658 - DNA, 20 bp, Homo sapiens
catctcttctcccgttaagg

SEQ ID NO: 6659 - DNA, 20 bp, Homo sapiens
ggtgcagaggccaccttaac

SEQ ID NO: 6660 - DNA, 20 bp, Homo sapiens
gaccatctcttctcccgtta

SEQ ID NO: 6661 - DNA, 20 bp, Homo sapiens
caccttaacgggagaagaga

SEQ ID NO: 6662 - DNA, 20 bp, Homo sapiens
tgggcgctgatgctgcagag

SEQ ID NO: 6663 - DNA, 20 bp, Homo sapiens
actctgcagcatcagcgccc

SEQ ID NO: 6664 - DNA, 20 bp, Homo sapiens
ctgcagcatcagcgcccagg

SEQ ID NO: 6665 - DNA, 20 bp, Homo sapiens
tgcagcatcagcgcccaggt

SEQ ID NO: 6666 - DNA, 20 bp, Homo sapiens
gacaagatttctacccacct

SEQ ID NO: 6667 - DNA, 20 bp, Homo sapiens
agacaagatttctacccacc

SEQ ID NO: 6668 - DNA, 20 bp, Homo sapiens
gttgggcacctactttctgt

SEQ ID NO: 6669 - DNA, 20 bp, Homo sapiens
tgttgggcacctactttctg

SEQ ID NO: 6670 - DNA, 20 bp, Homo sapiens
cttctattcccacagaaagt

SEQ ID NO: 6671 - DNA, 20 bp, Homo sapiens
ttctttcaacaaacactgtt

SEQ ID NO: 6672 - DNA, 20 bp, Homo sapiens
attctttcaacaaacactgt

SEQ ID NO: 6673 - DNA, 20 bp, Homo sapiens
tgaatgaatgaatgagtgag

SEQ ID NO: 6674 - DNA, 20 bp, Homo sapiens
gccaggacgactgagaagga

SEQ ID NO: 6675 - DNA, 20 bp, Homo sapiens
gagagccaggacgactgaga

SEQ ID NO: 6676 - DNA, 20 bp, Homo sapiens
tccttccttctcagtcgtcc

SEQ ID NO: 6677 - DNA, 20 bp, Homo sapiens
tgggggagagagggagagcc

SEQ ID NO: 6678 - DNA, 20 bp, Homo sapiens
gccgaatactgggggagaga

SEQ ID NO: 6679 - DNA, 20 bp, Homo sapiens
agccgaatactgggggagag

SEQ ID NO: 6680 - DNA, 20 bp, Homo sapiens
ggtggccagccgaatactgg

SEQ ID NO: 6681 - DNA, 20 bp, Homo sapiens
tggtggccagccgaatactg

SEQ ID NO: 6682 - DNA, 20 bp, Homo sapiens
tccctctctcccccagtatt

SEQ ID NO: 6683 - DNA, 20 bp, Homo sapiens
atggtggccagccgaatact

SEQ ID NO: 6684 - DNA, 20 bp, Homo sapiens
catggtggccagccgaatac

SEQ ID NO: 6685 - DNA, 20 bp, Homo sapiens
tctctcccccagtattcggc

SEQ ID NO: 6686 - DNA, 20 bp, Homo sapiens
caccgacaaagcactcatgg

SEQ ID NO: 6687 - DNA, 20 bp, Homo sapiens
cagcaccgacaaagcactca

SEQ ID NO: 6688 - DNA, 20 bp, Homo sapiens
ggccaccatgagtgctttgt

SEQ ID NO: 6689 - DNA, 20 bp, Homo sapiens
tttgtcggtgctgatctcag

SEQ ID NO: 6690 - DNA, 20 bp, Homo sapiens
gatctcagtggatgctgtct

SEQ ID NO: 6691 - DNA, 20 bp, Homo sapiens
atctcagtggatgctgtctt

SEQ ID NO: 6692 - DNA, 20 bp, Homo sapiens
tctcagtggatgctgtcttg

SEQ ID NO: 6693 - DNA, 20 bp, Homo sapiens
agtggatgctgtcttgggga

SEQ ID NO: 6694 - DNA, 20 bp, Homo sapiens
tgtcttggggaaggtcaact

SEQ ID NO: 6695 - DNA, 20 bp, Homo sapiens
gaaggtcaacttggcgcagt

SEQ ID NO: 6696 - DNA, 20 bp, Homo sapiens
ggtcaacttggcgcagttgg

SEQ ID NO: 6697 - DNA, 20 bp, Homo sapiens
cttggcgcagttggtggtga

SEQ ID NO: 6698 - DNA, 20 bp, Homo sapiens
gcagttggtggtgatggtgc

SEQ ID NO: 6699 - DNA, 20 bp, Homo sapiens
gttggtggtgatggtgctgg

SEQ ID NO: 6700 - DNA, 20 bp, Homo sapiens
ggtggtgatggtgctggtgg

SEQ ID NO: 6701 - DNA, 20 bp, Homo sapiens
ctggtggaggtgacagcttt

SEQ ID NO: 6702 - DNA, 20 bp, Homo sapiens
tgacagctttaggcaacctg

SEQ ID NO: 6703 - DNA, 20 bp, Homo sapiens
agctttaggcaacctgagga

SEQ ID NO: 6704 - DNA, 20 bp, Homo sapiens
tattactgatgaccatcctc

SEQ ID NO: 6705 - DNA, 20 bp, Homo sapiens
aatatcttcaacgtgagtca

SEQ ID NO: 6706 - DNA, 20 bp, Homo sapiens
ttcaacgtgagtcatggtgc

SEQ ID NO: 6707 - DNA, 20 bp, Homo sapiens
tcaacgtgagtcatggtgct

SEQ ID NO: 6708 - DNA, 20 bp, Homo sapiens
acgtgagtcatggtgctggg

SEQ ID NO: 6709 - DNA, 20 bp, Homo sapiens
tgagtcatggtgctgggagg

SEQ ID NO: 6710 - DNA, 20 bp, Homo sapiens
gagtcatggtgctgggagga

SEQ ID NO: 6711 - DNA, 20 bp, Homo sapiens
tggtgctgggaggagggacc

SEQ ID NO: 6712 - DNA, 20 bp, Homo sapiens
ggtgctgggaggagggacct

SEQ ID NO: 6713 - DNA, 20 bp, Homo sapiens
gcttttggcccttttctccc

SEQ ID NO: 6714 - DNA, 20 bp, Homo sapiens
gaggagggacctgggagaaa

SEQ ID NO: 6715 - DNA, 20 bp, Homo sapiens
aggagggacctgggagaaaa

SEQ ID NO: 6716 - DNA, 20 bp, Homo sapiens
accccaccaaatggagcttt

SEQ ID NO: 6717 - DNA, 20 bp, Homo sapiens
aaagggccaaaagctccatt

SEQ ID NO: 6718 - DNA, 20 bp, Homo sapiens
gggccaaaagctccatttgg

SEQ ID NO: 6719 - DNA, 20 bp, Homo sapiens
ggccaaaagctccatttggt

SEQ ID NO: 6720 - DNA, 20 bp, Homo sapiens
accctggaaaccccaccaaa

SEQ ID NO: 6721 - DNA, 20 bp, Homo sapiens
gccaaaagctccatttggtg

SEQ ID NO: 6722 - DNA, 20 bp, Homo sapiens
ctccatttggtggggtttcc

SEQ ID NO: 6723 - DNA, 20 bp, Homo sapiens
tccatttggtggggtttcca

SEQ ID NO: 6724 - DNA, 20 bp, Homo sapiens
gtctttatttttcaaaaccc

SEQ ID NO: 6725 - DNA, 20 bp, Homo sapiens
tcccaagtagctgggattac

SEQ ID NO: 6726 - DNA, 20 bp, Homo sapiens
cctcaacctcccaagtagct

SEQ ID NO: 6727 - DNA, 20 bp, Homo sapiens
aacctgtaatcccagctact

SEQ ID NO: 6728 - DNA, 20 bp, Homo sapiens
tcctcaacctcccaagtagc

SEQ ID NO: 6729 - DNA, 20 bp, Homo sapiens
acctgtaatcccagctactt

SEQ ID NO: 6730 - DNA, 20 bp, Homo sapiens
tgtaatcccagctacttggg

SEQ ID NO: 6731 - DNA, 20 bp, Homo sapiens
cccagctacttgggaggttg

SEQ ID NO: 6732 - DNA, 20 bp, Homo sapiens
agctacttgggaggttgagg

SEQ ID NO: 6733 - DNA, 20 bp, Homo sapiens
gctacttgggaggttgagga

SEQ ID NO: 6734 - DNA, 20 bp, Homo sapiens
tgaggagggaagatcacttg

SEQ ID NO: 6735 - DNA, 20 bp, Homo sapiens
agggaagatcacttgaggcc

SEQ ID NO: 6736 - DNA, 20 bp, Homo sapiens
ccaggctggtctcaaactcc

SEQ ID NO: 6737 - DNA, 20 bp, Homo sapiens
ccaggagtttgagaccagcc

SEQ ID NO: 6738 - DNA, 20 bp, Homo sapiens
caggagtttgagaccagcct

SEQ ID NO: 6739 - DNA, 20 bp, Homo sapiens
tcttgctatgatgcccaggc

SEQ ID NO: 6740 - DNA, 20 bp, Homo sapiens
aggatcttgctatgatgccc

SEQ ID NO: 6741 - DNA, 20 bp, Homo sapiens
aaaattactttttagagatg

SEQ ID NO: 6742 - DNA, 20 bp, Homo sapiens
ttttctaaattatccagttg

SEQ ID NO: 6743 - DNA, 20 bp, Homo sapiens
caggtgcatgccaccacaac

SEQ ID NO: 6744 - DNA, 20 bp, Homo sapiens
tctaaattatccagttgtgg

SEQ ID NO: 6745 - DNA, 20 bp, Homo sapiens
tcctgagtaactgagactac

SEQ ID NO: 6746 - DNA, 20 bp, Homo sapiens
acctgtagtctcagttactc

SEQ ID NO: 6747 - DNA, 20 bp, Homo sapiens
tgtagtctcagttactcagg

SEQ ID NO: 6748 - DNA, 20 bp, Homo sapiens
ctcagttactcaggaggctg

SEQ ID NO: 6749 - DNA, 20 bp, Homo sapiens
caggaggctgaggtgtgagt

SEQ ID NO: 6750 - DNA, 20 bp, Homo sapiens
aggctgaggtgtgagttgga

SEQ ID NO: 6751 - DNA, 20 bp, Homo sapiens
tggaaggattgtttgagccc

SEQ ID NO: 6752 - DNA, 20 bp, Homo sapiens
cagctcggtccctaactcct

SEQ ID NO: 6753 - DNA, 20 bp, Homo sapiens
attgtttgagcccaggagtt

SEQ ID NO: 6754 - DNA, 20 bp, Homo sapiens
ccagctcggtccctaactcc

SEQ ID NO: 6755 - DNA, 20 bp, Homo sapiens
ttgtttgagcccaggagtta

SEQ ID NO: 6756 - DNA, 20 bp, Homo sapiens
ccaggagttagggaccgagc

SEQ ID NO: 6757 - DNA, 20 bp, Homo sapiens
caggagttagggaccgagct

SEQ ID NO: 6758 - DNA, 20 bp, Homo sapiens
tcttgctatgttgcccagct

SEQ ID NO: 6759 - DNA, 20 bp, Homo sapiens
tacctatttatttagagatg

SEQ ID NO: 6760 - DNA, 20 bp, Homo sapiens
gacctcatctctaaataaat

SEQ ID NO: 6761 - DNA, 20 bp, Homo sapiens
tcatctctaaataaataggt

SEQ ID NO: 6762 - DNA, 20 bp, Homo sapiens
tctctaaataaataggtagg

SEQ ID NO: 6763 - DNA, 20 bp, Homo sapiens
agacagacagacagacagac

SEQ ID NO: 6764 - DNA, 20 bp, Homo sapiens
agacagacagacagacaggc

SEQ ID NO: 6765 - DNA, 20 bp, Homo sapiens
gacagacagacagacaggct

SEQ ID NO: 6766 - DNA, 20 bp, Homo sapiens
gacagacaggctgggtacag

SEQ ID NO: 6767 - DNA, 20 bp, Homo sapiens
tcccaaagtgctgggattac

SEQ ID NO: 6768 - DNA, 20 bp, Homo sapiens
ccttggcctcccaaagtgct

SEQ ID NO: 6769 - DNA, 20 bp, Homo sapiens
cacctgtaatcccagcactt

SEQ ID NO: 6770 - DNA, 20 bp, Homo sapiens
tccttggcctcccaaagtgc

SEQ ID NO: 6771 - DNA, 20 bp, Homo sapiens
acctgtaatcccagcacttt

SEQ ID NO: 6772 - DNA, 20 bp, Homo sapiens
tgtaatcccagcactttggg

SEQ ID NO: 6773 - DNA, 20 bp, Homo sapiens
cccagcactttgggaggcca

SEQ ID NO: 6774 - DNA, 20 bp, Homo sapiens
agcactttgggaggccaagg

SEQ ID NO: 6775 - DNA, 20 bp, Homo sapiens
gcactttgggaggccaagga

SEQ ID NO: 6776 - DNA, 20 bp, Homo sapiens
ctcaggtgatctgccctcct

SEQ ID NO: 6777 - DNA, 20 bp, Homo sapiens
caaggagggcagatcacctg

SEQ ID NO: 6778 - DNA, 20 bp, Homo sapiens
agggcagatcacctgaggtc

SEQ ID NO: 6779 - DNA, 20 bp, Homo sapiens
ggtcttgaactcctgacctc

SEQ ID NO: 6780 - DNA, 20 bp, Homo sapiens
tcaggagttcaagaccagcc

SEQ ID NO: 6781 - DNA, 20 bp, Homo sapiens
ttcccccatgttgaccaggc

SEQ ID NO: 6782 - DNA, 20 bp, Homo sapiens
gaggttcccccatgttgacc

SEQ ID NO: 6783 - DNA, 20 bp, Homo sapiens
caagaccagcctggtcaaca

SEQ ID NO: 6784 - DNA, 20 bp, Homo sapiens
aagaccagcctggtcaacat

SEQ ID NO: 6785 - DNA, 20 bp, Homo sapiens
agaccagcctggtcaacatg

SEQ ID NO: 6786 - DNA, 20 bp, Homo sapiens
gaccagcctggtcaacatgg

SEQ ID NO: 6787 - DNA, 20 bp, Homo sapiens
ttgtatttttagtagagatg

SEQ ID NO: 6788 - DNA, 20 bp, Homo sapiens
ctaaaaatacaaaatttagc

SEQ ID NO: 6789 - DNA, 20 bp, Homo sapiens
taaaaatacaaaatttagct

SEQ ID NO: 6790 - DNA, 20 bp, Homo sapiens
atacaaaatttagctgggca

SEQ ID NO: 6791 - DNA, 20 bp, Homo sapiens
caaaatttagctgggcatgg

SEQ ID NO: 6792 - DNA, 20 bp, Homo sapiens
atttagctgggcatggtggc

SEQ ID NO: 6793 - DNA, 20 bp, Homo sapiens
tcctgagtagctgggattac

SEQ ID NO: 6794 - DNA, 20 bp, Homo sapiens
cctcagcctcctgagtagct

SEQ ID NO: 6795 - DNA, 20 bp, Homo sapiens
gcctcagcctcctgagtagc

SEQ ID NO: 6796 - DNA, 20 bp, Homo sapiens
gcctgtaatcccagctactc

SEQ ID NO: 6797 - DNA, 20 bp, Homo sapiens
tgtaatcccagctactcagg

SEQ ID NO: 6798 - DNA, 20 bp, Homo sapiens
cccagctactcaggaggctg

SEQ ID NO: 6799 - DNA, 20 bp, Homo sapiens
gagaatcgcttgaacccgag

SEQ ID NO: 6800 - DNA, 20 bp, Homo sapiens
aatcgcttgaacccgagagg

SEQ ID NO: 6801 - DNA, 20 bp, Homo sapiens
cactgcaacctccacctctc

SEQ ID NO: 6802 - DNA, 20 bp, Homo sapiens
tcactgcaacctccacctct

SEQ ID NO: 6803 - DNA, 20 bp, Homo sapiens
cgcttgaacccgagaggtgg

SEQ ID NO: 6804 - DNA, 20 bp, Homo sapiens
gcagtgcaatggcgcgatct

SEQ ID NO: 6805 - DNA, 20 bp, Homo sapiens
tcccccaggctgcagtgcaa

SEQ ID NO: 6806 - DNA, 20 bp, Homo sapiens
cgcgccattgcactgcagcc

SEQ ID NO: 6807 - DNA, 20 bp, Homo sapiens
gcgccattgcactgcagcct

SEQ ID NO: 6808 - DNA, 20 bp, Homo sapiens
cgccattgcactgcagcctg

SEQ ID NO: 6809 - DNA, 20 bp, Homo sapiens
gccattgcactgcagcctgg

SEQ ID NO: 6810 - DNA, 20 bp, Homo sapiens
aagtcttgctcttgtccccc

SEQ ID NO: 6811 - DNA, 20 bp, Homo sapiens
cacatttttgtaaactcatt

SEQ ID NO: 6812 - DNA, 20 bp, Homo sapiens
caaatgagtttacaaaaatg

SEQ ID NO: 6813 - DNA, 20 bp, Homo sapiens
actgtagtagttaaaggcat

SEQ ID NO: 6814 - DNA, 20 bp, Homo sapiens
gattatactgtagtagttaa

SEQ ID NO: 6815 - DNA, 20 bp, Homo sapiens
ctactacagtataatcctgt

SEQ ID NO: 6816 - DNA, 20 bp, Homo sapiens
catgaatagcacaatcctac

SEQ ID NO: 6817 - DNA, 20 bp, Homo sapiens
tgctattcatgatataatta

SEQ ID NO: 6818 - DNA, 20 bp, Homo sapiens
tgctggacccactgctggtg

SEQ ID NO: 6819 - DNA, 20 bp, Homo sapiens
tctcagagcctcaccagcag

SEQ ID NO: 6820 - DNA, 20 bp, Homo sapiens
ctcagagcctcaccagcagt

SEQ ID NO: 6821 - DNA, 20 bp, Homo sapiens
aaacttgctggacccactgc

SEQ ID NO: 6822 - DNA, 20 bp, Homo sapiens
tgctggctgtacaaacttgc

SEQ ID NO: 6823 - DNA, 20 bp, Homo sapiens
cactgactgaaagaagatgc

SEQ ID NO: 6824 - DNA, 20 bp, Homo sapiens
aactgcatatgtcctctcat

SEQ ID NO: 6825 - DNA, 20 bp, Homo sapiens
actgcatatgtcctctcatt

SEQ ID NO: 6826 - DNA, 20 bp, Homo sapiens
cgacaggctctcccaatgag

SEQ ID NO: 6827 - DNA, 20 bp, Homo sapiens
ttcaaatttagactttcgac

SEQ ID NO: 6828 - DNA, 20 bp, Homo sapiens
tgtcgaaagtctaaatttga

SEQ ID NO: 6829 - DNA, 20 bp, Homo sapiens
aaatttgaaggcagctgtga

SEQ ID NO: 6830 - DNA, 20 bp, Homo sapiens
tgaaggcagctgtgaaggta

SEQ ID NO: 6831 - DNA, 20 bp, Homo sapiens
tctgggagagccatttggat

SEQ ID NO: 6832 - DNA, 20 bp, Homo sapiens
gaaggtaaggccaatccaaa

SEQ ID NO: 6833 - DNA, 20 bp, Homo sapiens
gaggatctgggagagccatt

SEQ ID NO: 6834 - DNA, 20 bp, Homo sapiens
agggttacagcagaggatct

SEQ ID NO: 6835 - DNA, 20 bp, Homo sapiens
cagggttacagcagaggatc

SEQ ID NO: 6836 - DNA, 20 bp, Homo sapiens
cagggtcagggttacagcag

SEQ ID NO: 6837 - DNA, 20 bp, Homo sapiens
tatgtcctcactcagggtca

SEQ ID NO: 6838 - DNA, 20 bp, Homo sapiens
ctatgtcctcactcagggtc

SEQ ID NO: 6839 - DNA, 20 bp, Homo sapiens
tgtaaccctgaccctgagtg

SEQ ID NO: 6840 - DNA, 20 bp, Homo sapiens
gttggctatgtcctcactca

SEQ ID NO: 6841 - DNA, 20 bp, Homo sapiens
ggttggctatgtcctcactc

SEQ ID NO: 6842 - DNA, 20 bp, Homo sapiens
cacctatgagatgggaaggt

SEQ ID NO: 6843 - DNA, 20 bp, Homo sapiens
ttctcacctatgagatggga

SEQ ID NO: 6844 - DNA, 20 bp, Homo sapiens
agctttctcacctatgagat

SEQ ID NO: 6845 - DNA, 20 bp, Homo sapiens
agccaaccttcccatctcat

SEQ ID NO: 6846 - DNA, 20 bp, Homo sapiens
cagctttctcacctatgaga

SEQ ID NO: 6847 - DNA, 20 bp, Homo sapiens
taggtgagaaagctgatgcc

SEQ ID NO: 6848 - DNA, 20 bp, Homo sapiens
gagaaagctgatgcctggag

SEQ ID NO: 6849 - DNA, 20 bp, Homo sapiens
agaaagctgatgcctggaga

SEQ ID NO: 6850 - DNA, 20 bp, Homo sapiens
gaaagctgatgcctggagag

SEQ ID NO: 6851 - DNA, 20 bp, Homo sapiens
ggcagtcccttcccctctcc

SEQ ID NO: 6852 - DNA, 20 bp, Homo sapiens
gctgatgcctggagagggga

SEQ ID NO: 6853 - DNA, 20 bp, Homo sapiens
ctgatgcctggagaggggaa

SEQ ID NO: 6854 - DNA, 20 bp, Homo sapiens
ctatcttgctatgtgatctt

SEQ ID NO: 6855 - DNA, 20 bp, Homo sapiens
actatcttgctatgtgatct

SEQ ID NO: 6856 - DNA, 20 bp, Homo sapiens
aagatcacatagcaagatag

SEQ ID NO: 6857 - DNA, 20 bp, Homo sapiens
ggaactgtgggttctcgctt

SEQ ID NO: 6858 - DNA, 20 bp, Homo sapiens
tggaactgtgggttctcgct

SEQ ID NO: 6859 - DNA, 20 bp, Homo sapiens
ctaagccaggctggaactgt

SEQ ID NO: 6860 - DNA, 20 bp, Homo sapiens
tctaagccaggctggaactg

SEQ ID NO: 6861 - DNA, 20 bp, Homo sapiens
gagaacccacagttccagcc

SEQ ID NO: 6862 - DNA, 20 bp, Homo sapiens
cactttcttctaagccaggc

SEQ ID NO: 6863 - DNA, 20 bp, Homo sapiens
agtgcactttcttctaagcc

SEQ ID NO: 6864 - DNA, 20 bp, Homo sapiens
tggcttagaagaaagtgcac

SEQ ID NO: 6865 - DNA, 20 bp, Homo sapiens
agaagaaagtgcactggact

SEQ ID NO: 6866 - DNA, 20 bp, Homo sapiens
tgcactggacttggagtcaa

SEQ ID NO: 6867 - DNA, 20 bp, Homo sapiens
ctggacttggagtcaaaggc

SEQ ID NO: 6868 - DNA, 20 bp, Homo sapiens
tggacttggagtcaaaggct

SEQ ID NO: 6869 - DNA, 20 bp, Homo sapiens
ggacttggagtcaaaggctg

SEQ ID NO: 6870 - DNA, 20 bp, Homo sapiens
cagggatttatggcagagct

SEQ ID NO: 6871 - DNA, 20 bp, Homo sapiens
acagggatttatggcagagc

SEQ ID NO: 6872 - DNA, 20 bp, Homo sapiens
cagagtcacacagggattta

SEQ ID NO: 6873 - DNA, 20 bp, Homo sapiens
aaattgcccagagtcacaca

SEQ ID NO: 6874 - DNA, 20 bp, Homo sapiens
taaattgcccagagtcacac

SEQ ID NO: 6875 - DNA, 20 bp, Homo sapiens
cataaatccctgtgtgactc

SEQ ID NO: 6876 - DNA, 20 bp, Homo sapiens
ataaatccctgtgtgactct

SEQ ID NO: 6877 - DNA, 20 bp, Homo sapiens
gaagaaactaaagctctaag

SEQ ID NO: 6878 - DNA, 20 bp, Homo sapiens
gtttcttcatctgtaatatg

SEQ ID NO: 6879 - DNA, 20 bp, Homo sapiens
tttcttcatctgtaatatga

SEQ ID NO: 6880 - DNA, 20 bp, Homo sapiens
gggtagcagtactaccacat

SEQ ID NO: 6881 - DNA, 20 bp, Homo sapiens
ggtagcagtactaccacata

SEQ ID NO: 6882 - DNA, 20 bp, Homo sapiens
tactccctcaaaaccctatg

SEQ ID NO: 6883 - DNA, 20 bp, Homo sapiens
tactaccacatagggttttg

SEQ ID NO: 6884 - DNA, 20 bp, Homo sapiens
actaccacatagggttttga

SEQ ID NO: 6885 - DNA, 20 bp, Homo sapiens
gacactgaggcacagtaaag

SEQ ID NO: 6886 - DNA, 20 bp, Homo sapiens
ggacactgaggcacagtaaa

SEQ ID NO: 6887 - DNA, 20 bp, Homo sapiens
gggacactgaggcacagtaa

SEQ ID NO: 6888 - DNA, 20 bp, Homo sapiens
caaagtcctttgggacactg

SEQ ID NO: 6889 - DNA, 20 bp, Homo sapiens
actgtgcctcagtgtcccaa

SEQ ID NO: 6890 - DNA, 20 bp, Homo sapiens
agtaaaatccaaagtccttt

SEQ ID NO: 6891 - DNA, 20 bp, Homo sapiens
gagtaaaatccaaagtcctt

SEQ ID NO: 6892 - DNA, 20 bp, Homo sapiens
ctcagtgtcccaaaggactt

SEQ ID NO: 6893 - DNA, 20 bp, Homo sapiens
gattttactctgagaaatac

SEQ ID NO: 6894 - DNA, 20 bp, Homo sapiens
attttactctgagaaataca

SEQ ID NO: 6895 - DNA, 20 bp, Homo sapiens
tgagaaatacagggagaact

SEQ ID NO: 6896 - DNA, 20 bp, Homo sapiens
gagaaatacagggagaacta

SEQ ID NO: 6897 - DNA, 20 bp, Homo sapiens
cagggagaactagggagtgt

SEQ ID NO: 6898 - DNA, 20 bp, Homo sapiens
agggagaactagggagtgtt

SEQ ID NO: 6899 - DNA, 20 bp, Homo sapiens
aactagggagtgttgggcag

SEQ ID NO: 6900 - DNA, 20 bp, Homo sapiens
ttaaaacataagtcagatca

SEQ ID NO: 6901 - DNA, 20 bp, Homo sapiens
acttatgttttaagatactc

SEQ ID NO: 6902 - DNA, 20 bp, Homo sapiens
ttttaagatactctggcttc

SEQ ID NO: 6903 - DNA, 20 bp, Homo sapiens
tttaagatactctggcttct

SEQ ID NO: 6904 - DNA, 20 bp, Homo sapiens
ctgggttcagaaaagactga

SEQ ID NO: 6905 - DNA, 20 bp, Homo sapiens
tgggttcagaaaagactgaa

SEQ ID NO: 6906 - DNA, 20 bp, Homo sapiens
gggttcagaaaagactgaag

SEQ ID NO: 6907 - DNA, 20 bp, Homo sapiens
aaagactgaaggggcaagag

SEQ ID NO: 6908 - DNA, 20 bp, Homo sapiens
gaaggggcaagagaggaagc

SEQ ID NO: 6909 - DNA, 20 bp, Homo sapiens
ggggcaagagaggaagcagg

SEQ ID NO: 6910 - DNA, 20 bp, Homo sapiens
gaagcaggtggagaccagag

SEQ ID NO: 6911 - DNA, 20 bp, Homo sapiens
gatggcaatcactgccgctc

SEQ ID NO: 6912 - DNA, 20 bp, Homo sapiens
gacaatagctgtgagagtga

SEQ ID NO: 6913 - DNA, 20 bp, Homo sapiens
acaatagctgtgagagtgat

SEQ ID NO: 6914 - DNA, 20 bp, Homo sapiens
gctgtgagagtgatgggaag

SEQ ID NO: 6915 - DNA, 20 bp, Homo sapiens
tgagagtgatgggaagtggt

SEQ ID NO: 6916 - DNA, 20 bp, Homo sapiens
tctgctattaaaatacagtc

SEQ ID NO: 6917 - DNA, 20 bp, Homo sapiens
attttaatagcagaattgac

SEQ ID NO: 6918 - DNA, 20 bp, Homo sapiens
atttgctgatagactgcacg

SEQ ID NO: 6919 - DNA, 20 bp, Homo sapiens
tttgctgatagactgcacgt

SEQ ID NO: 6920 - DNA, 20 bp, Homo sapiens
ttgctgatagactgcacgtg

SEQ ID NO: 6921 - DNA, 20 bp, Homo sapiens
ctgatagactgcacgtgggg

SEQ ID NO: 6922 - DNA, 20 bp, Homo sapiens
tgatagactgcacgtggggt

SEQ ID NO: 6923 - DNA, 20 bp, Homo sapiens
gactgcacgtggggtgggag

SEQ ID NO: 6924 - DNA, 20 bp, Homo sapiens
actgcacgtggggtgggaga

SEQ ID NO: 6925 - DNA, 20 bp, Homo sapiens
agagggtcaagatgacttca

SEQ ID NO: 6926 - DNA, 20 bp, Homo sapiens
atgacttcaaggttctcatc

SEQ ID NO: 6927 - DNA, 20 bp, Homo sapiens
tctcatctggcacaactcag

SEQ ID NO: 6928 - DNA, 20 bp, Homo sapiens
tggcacaactcagcggctgc

SEQ ID NO: 6929 - DNA, 20 bp, Homo sapiens
acattccccatctcagtaaa

SEQ ID NO: 6930 - DNA, 20 bp, Homo sapiens
gctggtgccatttactgaga

SEQ ID NO: 6931 - DNA, 20 bp, Homo sapiens
ctggtgccatttactgagat

SEQ ID NO: 6932 - DNA, 20 bp, Homo sapiens
tggtgccatttactgagatg

SEQ ID NO: 6933 - DNA, 20 bp, Homo sapiens
tttactgagatggggaatgt

SEQ ID NO: 6934 - DNA, 20 bp, Homo sapiens
ttactgagatggggaatgtt

SEQ ID NO: 6935 - DNA, 20 bp, Homo sapiens
tactgagatggggaatgttg

SEQ ID NO: 6936 - DNA, 20 bp, Homo sapiens
tgagatggggaatgttgggg

SEQ ID NO: 6937 - DNA, 20 bp, Homo sapiens
gagatggggaatgttggggt

SEQ ID NO: 6938 - DNA, 20 bp, Homo sapiens
atgttggggtgggatagatc

SEQ ID NO: 6939 - DNA, 20 bp, Homo sapiens
tgttggggtgggatagatct

SEQ ID NO: 6940 - DNA, 20 bp, Homo sapiens
tggggtgggatagatctggg

SEQ ID NO: 6941 - DNA, 20 bp, Homo sapiens
ggggtgggatagatctggga

SEQ ID NO: 6942 - DNA, 20 bp, Homo sapiens
cacattcgacactgaactct

SEQ ID NO: 6943 - DNA, 20 bp, Homo sapiens
ccacattcgacactgaactc

SEQ ID NO: 6944 - DNA, 20 bp, Homo sapiens
ccagagttcagtgtcgaatg

SEQ ID NO: 6945 - DNA, 20 bp, Homo sapiens
gtgtcgaatgtggtagcgtt

SEQ ID NO: 6946 - DNA, 20 bp, Homo sapiens
tgtcgaatgtggtagcgtta

SEQ ID NO: 6947 - DNA, 20 bp, Homo sapiens
atgtggtagcgttagggtta

SEQ ID NO: 6948 - DNA, 20 bp, Homo sapiens
ggtagcgttagggttaaggt

SEQ ID NO: 6949 - DNA, 20 bp, Homo sapiens
gtagcgttagggttaaggtt

SEQ ID NO: 6950 - DNA, 20 bp, Homo sapiens
tagcgttagggttaaggttg

SEQ ID NO: 6951 - DNA, 20 bp, Homo sapiens
agcgttagggttaaggttgg

SEQ ID NO: 6952 - DNA, 20 bp, Homo sapiens
gttagggttaaggttggggg

SEQ ID NO: 6953 - DNA, 20 bp, Homo sapiens
ttagggttaaggttggggga

SEQ ID NO: 6954 - DNA, 20 bp, Homo sapiens
tagggttaaggttgggggag

SEQ ID NO: 6955 - DNA, 20 bp, Homo sapiens
agggttaaggttgggggagg

SEQ ID NO: 6956 - DNA, 20 bp, Homo sapiens
gggttaaggttgggggaggg

SEQ ID NO: 6957 - DNA, 20 bp, Homo sapiens
ggttaaggttgggggagggg

SEQ ID NO: 6958 - DNA, 20 bp, Homo sapiens
atgtgtatgaaacatcccag

SEQ ID NO: 6959 - DNA, 20 bp, Homo sapiens
ctccattcagtgtctccact

SEQ ID NO: 6960 - DNA, 20 bp, Homo sapiens
tctccattcagtgtctccac

SEQ ID NO: 6961 - DNA, 20 bp, Homo sapiens
atcccagtggagacactgaa

SEQ ID NO: 6962 - DNA, 20 bp, Homo sapiens
tgtacaagtctgaagcttag

SEQ ID NO: 6963 - DNA, 20 bp, Homo sapiens
aagtctgaagcttagtggaa

SEQ ID NO: 6964 - DNA, 20 bp, Homo sapiens
tgaagcttagtggaaaggtt

SEQ ID NO: 6965 - DNA, 20 bp, Homo sapiens
gaagcttagtggaaaggtta

SEQ ID NO: 6966 - DNA, 20 bp, Homo sapiens
ttagtggaaaggttagggct

SEQ ID NO: 6967 - DNA, 20 bp, Homo sapiens
tagtggaaaggttagggcta

SEQ ID NO: 6968 - DNA, 20 bp, Homo sapiens
tagggctagggatataaatt

SEQ ID NO: 6969 - DNA, 20 bp, Homo sapiens
agggctagggatataaattt

SEQ ID NO: 6970 - DNA, 20 bp, Homo sapiens
gggagttgttacaatacaga

SEQ ID NO: 6971 - DNA, 20 bp, Homo sapiens
agtgatctccttgggtctca

SEQ ID NO: 6972 - DNA, 20 bp, Homo sapiens
gtttaaagccatgagaccca

SEQ ID NO: 6973 - DNA, 20 bp, Homo sapiens
cactcctgagtgatctcctt

SEQ ID NO: 6974 - DNA, 20 bp, Homo sapiens
tcactcctgagtgatctcct

SEQ ID NO: 6975 - DNA, 20 bp, Homo sapiens
gagacccaaggagatcactc

SEQ ID NO: 6976 - DNA, 20 bp, Homo sapiens
aaggagatcactcaggagtg

SEQ ID NO: 6977 - DNA, 20 bp, Homo sapiens
ggagtgaggataaagagaga

SEQ ID NO: 6978 - DNA, 20 bp, Homo sapiens
gagtgaggataaagagagat

SEQ ID NO: 6979 - DNA, 20 bp, Homo sapiens
gagagatgggaagaagtctg

SEQ ID NO: 6980 - DNA, 20 bp, Homo sapiens
tctaaaatgcagggtgttct

SEQ ID NO: 6981 - DNA, 20 bp, Homo sapiens
tgtcccccctctaaaatgca

SEQ ID NO: 6982 - DNA, 20 bp, Homo sapiens
atgtcccccctctaaaatgc

SEQ ID NO: 6983 - DNA, 20 bp, Homo sapiens
tagaacaccctgcattttag

SEQ ID NO: 6984 - DNA, 20 bp, Homo sapiens
agaacaccctgcattttaga

SEQ ID NO: 6985 - DNA, 20 bp, Homo sapiens
gaacaccctgcattttagag

SEQ ID NO: 6986 - DNA, 20 bp, Homo sapiens
aacaccctgcattttagagg

SEQ ID NO: 6987 - DNA, 20 bp, Homo sapiens
acaccctgcattttagaggg

SEQ ID NO: 6988 - DNA, 20 bp, Homo sapiens
acatgtgtaagagccagcaa

SEQ ID NO: 6989 - DNA, 20 bp, Homo sapiens
cacaattctgtctcctttgc

SEQ ID NO: 6990 - DNA, 20 bp, Homo sapiens
aaaggagacagaattgtgct

SEQ ID NO: 6991 - DNA, 20 bp, Homo sapiens
agacagaattgtgcttggag

SEQ ID NO: 6992 - DNA, 20 bp, Homo sapiens
agaattgtgcttggagaggc

SEQ ID NO: 6993 - DNA, 20 bp, Homo sapiens
attgtgcttggagaggcagg

SEQ ID NO: 6994 - DNA, 20 bp, Homo sapiens
ggagaggcaggaggaagccc

SEQ ID NO: 6995 - DNA, 20 bp, Homo sapiens
ccaggacctcacgctctcct

SEQ ID NO: 6996 - DNA, 20 bp, Homo sapiens
tccaggacctcacgctctcc

SEQ ID NO: 6997 - DNA, 20 bp, Homo sapiens
aggaagcccaggagagcgtg

SEQ ID NO: 6998 - DNA, 20 bp, Homo sapiens
cccaggagagcgtgaggtcc

SEQ ID NO: 6999 - DNA, 20 bp, Homo sapiens
ggagagcgtgaggtcctgga

SEQ ID NO: 7000 - DNA, 20 bp, Homo sapiens
cctctctttccttgccttcc

SEQ ID NO: 7001 - DNA, 20 bp, Homo sapiens
gcgtgaggtcctggaaggca

SEQ ID NO: 7002 - DNA, 20 bp, Homo sapiens
cctggaaggcaaggaaagag

SEQ ID NO: 7003 - DNA, 20 bp, Homo sapiens
ctggaaggcaaggaaagaga

SEQ ID NO: 7004 - DNA, 20 bp, Homo sapiens
gcaaggaaagagagggcccc

SEQ ID NO: 7005 - DNA, 20 bp, Homo sapiens
aggaaagagagggccccagg

SEQ ID NO: 7006 - DNA, 20 bp, Homo sapiens
ggaaagagagggccccaggt

SEQ ID NO: 7007 - DNA, 20 bp, Homo sapiens
agcagcattcagcccacctg

SEQ ID NO: 7008 - DNA, 20 bp, Homo sapiens
cagcagcattcagcccacct

SEQ ID NO: 7009 - DNA, 20 bp, Homo sapiens
tcagcagcattcagcccacc

SEQ ID NO: 7010 - DNA, 20 bp, Homo sapiens
gtgggctgaatgctgctgag

SEQ ID NO: 7011 - DNA, 20 bp, Homo sapiens
atgctgctgagaggtcaagt

SEQ ID NO: 7012 - DNA, 20 bp, Homo sapiens
ctgagaggtcaagtcggatg

SEQ ID NO: 7013 - DNA, 20 bp, Homo sapiens
tgagaggtcaagtcggatga

SEQ ID NO: 7014 - DNA, 20 bp, Homo sapiens
aggtcaagtcggatgagggc

SEQ ID NO: 7015 - DNA, 20 bp, Homo sapiens
ggtcaagtcggatgagggct

SEQ ID NO: 7016 - DNA, 20 bp, Homo sapiens
gagggctgggaagtagccat

SEQ ID NO: 7017 - DNA, 20 bp, Homo sapiens
ggtctcctggccaaatccaa

SEQ ID NO: 7018 - DNA, 20 bp, Homo sapiens
tgggaagtagccattggatt

SEQ ID NO: 7019 - DNA, 20 bp, Homo sapiens
agtagccattggatttggcc

SEQ ID NO: 7020 - DNA, 20 bp, Homo sapiens
ccatgcatgccaaggtctcc

SEQ ID NO: 7021 - DNA, 20 bp, Homo sapiens
tggatttggccaggagacct

SEQ ID NO: 7022 - DNA, 20 bp, Homo sapiens
ctctacaaccatgcatgcca

SEQ ID NO: 7023 - DNA, 20 bp, Homo sapiens
ccaggagaccttggcatgca

SEQ ID NO: 7024 - DNA, 20 bp, Homo sapiens
cttggcatgcatggttgtag

SEQ ID NO: 7025 - DNA, 20 bp, Homo sapiens
ggcatgcatggttgtagagg

SEQ ID NO: 7026 - DNA, 20 bp, Homo sapiens
atggttgtagaggaggatga

SEQ ID NO: 7027 - DNA, 20 bp, Homo sapiens
ggaggatgaaggcaacagcc

SEQ ID NO: 7028 - DNA, 20 bp, Homo sapiens
gctcttgaatcagtcaagcc

SEQ ID NO: 7029 - DNA, 20 bp, Homo sapiens
ggcttgactgattcaagagc

SEQ ID NO: 7030 - DNA, 20 bp, Homo sapiens
aagagcaggagatgagaaag

SEQ ID NO: 7031 - DNA, 20 bp, Homo sapiens
agaaagtggagacagcatgc

SEQ ID NO: 7032 - DNA, 20 bp, Homo sapiens
gaaagtggagacagcatgca

SEQ ID NO: 7033 - DNA, 20 bp, Homo sapiens
aaagtggagacagcatgcag

SEQ ID NO: 7034 - DNA, 20 bp, Homo sapiens
atgcaggggcagctctgcca

SEQ ID NO: 7035 - DNA, 20 bp, Homo sapiens
cccctttatagcaaagtcct

SEQ ID NO: 7036 - DNA, 20 bp, Homo sapiens
tgccaaggactttgctataa

SEQ ID NO: 7037 - DNA, 20 bp, Homo sapiens
gccaaggactttgctataaa

SEQ ID NO: 7038 - DNA, 20 bp, Homo sapiens
ccaaggactttgctataaag

SEQ ID NO: 7039 - DNA, 20 bp, Homo sapiens
tataaaggggaacagagaaa

SEQ ID NO: 7040 - DNA, 20 bp, Homo sapiens
aaaggggaacagagaaatgg

SEQ ID NO: 7041 - DNA, 20 bp, Homo sapiens
cagagaaatggaggagaagc

SEQ ID NO: 7042 - DNA, 20 bp, Homo sapiens
agaaatggaggagaagcagg

SEQ ID NO: 7043 - DNA, 20 bp, Homo sapiens
gaaatggaggagaagcagga

SEQ ID NO: 7044 - DNA, 20 bp, Homo sapiens
agggcaataatccgatagag

SEQ ID NO: 7045 - DNA, 20 bp, Homo sapiens
atcagatttttcctctctat

SEQ ID NO: 7046 - DNA, 20 bp, Homo sapiens
caagagtcaagcctttgagt

SEQ ID NO: 7047 - DNA, 20 bp, Homo sapiens
actcctgctttccaactcaa

SEQ ID NO: 7048 - DNA, 20 bp, Homo sapiens
aagcctttgagttggaaagc

SEQ ID NO: 7049 - DNA, 20 bp, Homo sapiens
tttgagttggaaagcaggag

SEQ ID NO: 7050 - DNA, 20 bp, Homo sapiens
ttgagttggaaagcaggagt

SEQ ID NO: 7051 - DNA, 20 bp, Homo sapiens
ttttgagcactgataccttt

SEQ ID NO: 7052 - DNA, 20 bp, Homo sapiens
ctgtccctgcatcggcctaa

SEQ ID NO: 7053 - DNA, 20 bp, Homo sapiens
tgatacctttaggccgatgc

SEQ ID NO: 7054 - DNA, 20 bp, Homo sapiens
gatacctttaggccgatgca

SEQ ID NO: 7055 - DNA, 20 bp, Homo sapiens
aagatgaactgtccctgcat

SEQ ID NO: 7056 - DNA, 20 bp, Homo sapiens
cattagagattcccattgtg

SEQ ID NO: 7057 - DNA, 20 bp, Homo sapiens
aattgttatttccgcacaat

SEQ ID NO: 7058 - DNA, 20 bp, Homo sapiens
aaattgttatttccgcacaa

SEQ ID NO: 7059 - DNA, 20 bp, Homo sapiens
tacttatagttttatatttg

SEQ ID NO: 7060 - DNA, 20 bp, Homo sapiens
aattaaatctcagtttacaa

SEQ ID NO: 7061 - DNA, 20 bp, Homo sapiens
ataatattttgatatgtctc

SEQ ID NO: 7062 - DNA, 20 bp, Homo sapiens
taatattttgatatgtctct

SEQ ID NO: 7063 - DNA, 20 bp, Homo sapiens
aatattttgatatgtctctg

SEQ ID NO: 7064 - DNA, 20 bp, Homo sapiens
tggggaaacttgcccttaaa

SEQ ID NO: 7065 - DNA, 20 bp, Homo sapiens
gatacagaagttccatttaa

SEQ ID NO: 7066 - DNA, 20 bp, Homo sapiens
agatacagaagttccattta

SEQ ID NO: 7067 - DNA, 20 bp, Homo sapiens
aaatcctaggaagaaacgct

SEQ ID NO: 7068 - DNA, 20 bp, Homo sapiens
cactccaagcgtttcttcct

SEQ ID NO: 7069 - DNA, 20 bp, Homo sapiens
attataaatttctaaatcct

SEQ ID NO: 7070 - DNA, 20 bp, Homo sapiens
actagggaaattttaaaatt

SEQ ID NO: 7071 - DNA, 20 bp, Homo sapiens
actgatggttacatatacta

SEQ ID NO: 7072 - DNA, 20 bp, Homo sapiens
tactgatggttacatatact

SEQ ID NO: 7073 - DNA, 20 bp, Homo sapiens
tagtatatgtaaccatcagt

SEQ ID NO: 7074 - DNA, 20 bp, Homo sapiens
cagtagataccacctactga

SEQ ID NO: 7075 - DNA, 20 bp, Homo sapiens
tatatgtaaccatcagtagg

SEQ ID NO: 7076 - DNA, 20 bp, Homo sapiens
gtggtatctactgactagag

SEQ ID NO: 7077 - DNA, 20 bp, Homo sapiens
tggtatctactgactagaga

SEQ ID NO: 7078 - DNA, 20 bp, Homo sapiens
ccttgggaataatggacaaa

SEQ ID NO: 7079 - DNA, 20 bp, Homo sapiens
gccttgggaataatggacaa

SEQ ID NO: 7080 - DNA, 20 bp, Homo sapiens
catatttgccttgggaataa

SEQ ID NO: 7081 - DNA, 20 bp, Homo sapiens
ccctttgtccattattccca

SEQ ID NO: 7082 - DNA, 20 bp, Homo sapiens
caaatttccatatttgcctt

SEQ ID NO: 7083 - DNA, 20 bp, Homo sapiens
tcaaatttccatatttgcct

SEQ ID NO: 7084 - DNA, 20 bp, Homo sapiens
cattattcccaaggcaaata

SEQ ID NO: 7085 - DNA, 20 bp, Homo sapiens
tgtactaatcataataaagc

SEQ ID NO: 7086 - DNA, 20 bp, Homo sapiens
taagagattgagaaattaaa

SEQ ID NO: 7087 - DNA, 20 bp, Homo sapiens
ttgtgagtcttataagaagc

SEQ ID NO: 7088 - DNA, 20 bp, Homo sapiens
tgtgagtcttataagaagct

SEQ ID NO: 7089 - DNA, 20 bp, Homo sapiens
gagtcttataagaagctggg

SEQ ID NO: 7090 - DNA, 20 bp, Homo sapiens
tgtattctggtgagttaatg

SEQ ID NO: 7091 - DNA, 20 bp, Homo sapiens
ctgtattctggtgagttaat

SEQ ID NO: 7092 - DNA, 20 bp, Homo sapiens
tctgtattctggtgagttaa

SEQ ID NO: 7093 - DNA, 20 bp, Homo sapiens
tgagactgagttctgtattc

SEQ ID NO: 7094 - DNA, 20 bp, Homo sapiens
ctttgaggaaaaggtttgag

SEQ ID NO: 7095 - DNA, 20 bp, Homo sapiens
gaatttaatctttgaggaaa

SEQ ID NO: 7096 - DNA, 20 bp, Homo sapiens
ttttcagaatttaatctttg

SEQ ID NO: 7097 - DNA, 20 bp, Homo sapiens
atcttgtgattaagagaaga

SEQ ID NO: 7098 - DNA, 20 bp, Homo sapiens
agaagaaggctgtccaccaa

SEQ ID NO: 7099 - DNA, 20 bp, Homo sapiens
gaagaaggctgtccaccaat

SEQ ID NO: 7100 - DNA, 20 bp, Homo sapiens
ataacagataagcccattgg

SEQ ID NO: 7101 - DNA, 20 bp, Homo sapiens
gaaataacagataagcccat

SEQ ID NO: 7102 - DNA, 20 bp, Homo sapiens
atgccattaagctcacaata

SEQ ID NO: 7103 - DNA, 20 bp, Homo sapiens
cttccttattgtgagcttaa

SEQ ID NO: 7104 - DNA, 20 bp, Homo sapiens
ttaatggcatgacaaagcag

SEQ ID NO: 7105 - DNA, 20 bp, Homo sapiens
atgacaaagcagaggcaaag

SEQ ID NO: 7106 - DNA, 20 bp, Homo sapiens
atacatcaattcttcaaagt

SEQ ID NO: 7107 - DNA, 20 bp, Homo sapiens
ttcaaagtaggaagtcaaaa

SEQ ID NO: 7108 - DNA, 20 bp, Homo sapiens
aggtcagagcttccacagca

SEQ ID NO: 7109 - DNA, 20 bp, Homo sapiens
gcaaagctgttgccatgctg

SEQ ID NO: 7110 - DNA, 20 bp, Homo sapiens
tatttcaactatcacgatgt

SEQ ID NO: 7111 - DNA, 20 bp, Homo sapiens
ctatttcaactatcacgatg

SEQ ID NO: 7112 - DNA, 20 bp, Homo sapiens
gaaatagcaaagcccagcaa

SEQ ID NO: 7113 - DNA, 20 bp, Homo sapiens
tttcagctttaacctttgct

SEQ ID NO: 7114 - DNA, 20 bp, Homo sapiens
ttttcagctttaacctttgc

SEQ ID NO: 7115 - DNA, 20 bp, Homo sapiens
agctgccaaggcagggcttt

SEQ ID NO: 7116 - DNA, 20 bp, Homo sapiens
aaatgccaaaagccctgcct

SEQ ID NO: 7117 - DNA, 20 bp, Homo sapiens
cgcagaaagctgccaaggca

SEQ ID NO: 7118 - DNA, 20 bp, Homo sapiens
tcgcagaaagctgccaaggc

SEQ ID NO: 7119 - DNA, 20 bp, Homo sapiens
tgcctcgcagaaagctgcca

SEQ ID NO: 7120 - DNA, 20 bp, Homo sapiens
tgccttggcagctttctgcg

SEQ ID NO: 7121 - DNA, 20 bp, Homo sapiens
tgttactgattatgttcatg

SEQ ID NO: 7122 - DNA, 20 bp, Homo sapiens
ttgttactgattatgttcat

SEQ ID NO: 7123 - DNA, 20 bp, Homo sapiens
gttgttactgattatgttca

SEQ ID NO: 7124 - DNA, 20 bp, Homo sapiens
aatcagtaacaacttgtcca

SEQ ID NO: 7125 - DNA, 20 bp, Homo sapiens
cttcatggtcactggggcct

SEQ ID NO: 7126 - DNA, 20 bp, Homo sapiens
ctcactcttcatggtcactg

SEQ ID NO: 7127 - DNA, 20 bp, Homo sapiens
cctcactcttcatggtcact

SEQ ID NO: 7128 - DNA, 20 bp, Homo sapiens
ccctcactcttcatggtcac

SEQ ID NO: 7129 - DNA, 20 bp, Homo sapiens
gctgcagccctcactcttca

SEQ ID NO: 7130 - DNA, 20 bp, Homo sapiens
cccagtgaccatgaagagtg

SEQ ID NO: 7131 - DNA, 20 bp, Homo sapiens
ccagtgaccatgaagagtga

SEQ ID NO: 7132 - DNA, 20 bp, Homo sapiens
gaagagtgagggctgcagcc

SEQ ID NO: 7133 - DNA, 20 bp, Homo sapiens
aagagtgagggctgcagcca

SEQ ID NO: 7134 - DNA, 20 bp, Homo sapiens
ctctgcgacggactattccc

SEQ ID NO: 7135 - DNA, 20 bp, Homo sapiens
tttgaatccttgctctgcga

SEQ ID NO: 7136 - DNA, 20 bp, Homo sapiens
gaatagtccgtcgcagagca

SEQ ID NO: 7137 - DNA, 20 bp, Homo sapiens
caaggattcaaataagcagc

SEQ ID NO: 7138 - DNA, 20 bp, Homo sapiens
tttgctcccgggtctgcttc

SEQ ID NO: 7139 - DNA, 20 bp, Homo sapiens
taagcagccggaagcagacc

SEQ ID NO: 7140 - DNA, 20 bp, Homo sapiens
aagcagccggaagcagaccc

SEQ ID NO: 7141 - DNA, 20 bp, Homo sapiens
gttgtcagtgttttgctccc

SEQ ID NO: 7142 - DNA, 20 bp, Homo sapiens
ggttgtcagtgttttgctcc

SEQ ID NO: 7143 - DNA, 20 bp, Homo sapiens
tctccactggactagcgaga

SEQ ID NO: 7144 - DNA, 20 bp, Homo sapiens
ctctccactggactagcgag

SEQ ID NO: 7145 - DNA, 20 bp, Homo sapiens
caaccctctcgctagtccag

SEQ ID NO: 7146 - DNA, 20 bp, Homo sapiens
ccaaggctgcatctctccac

SEQ ID NO: 7147 - DNA, 20 bp, Homo sapiens
ccagtggagagatgcagcct

SEQ ID NO: 7148 - DNA, 20 bp, Homo sapiens
gagccaccattctggctcca

SEQ ID NO: 7149 - DNA, 20 bp, Homo sapiens
atgcagccttggagccagaa

SEQ ID NO: 7150 - DNA, 20 bp, Homo sapiens
cagccttggagccagaatgg

SEQ ID NO: 7151 - DNA, 20 bp, Homo sapiens
ttgtcaccgagccaccattc

SEQ ID NO: 7152 - DNA, 20 bp, Homo sapiens
ttggagccagaatggtggct

SEQ ID NO: 7153 - DNA, 20 bp, Homo sapiens
cgacctatcccagaatggtg

SEQ ID NO: 7154 - DNA, 20 bp, Homo sapiens
tgctgcactccacaccattc

SEQ ID NO: 7155 - DNA, 20 bp, Homo sapiens
gctgcactccacaccattct

SEQ ID NO: 7156 - DNA, 20 bp, Homo sapiens
aggaccgacctatcccagaa

SEQ ID NO: 7157 - DNA, 20 bp, Homo sapiens
actccacaccattctgggat

SEQ ID NO: 7158 - DNA, 20 bp, Homo sapiens
cacaccattctgggataggt

SEQ ID NO: 7159 - DNA, 20 bp, Homo sapiens
tcatatctcagcatttcttc

SEQ ID NO: 7160 - DNA, 20 bp, Homo sapiens
agaaatgctgagatatgagc

SEQ ID NO: 7161 - DNA, 20 bp, Homo sapiens
atatgagcaggtctgaccac

SEQ ID NO: 7162 - DNA, 20 bp, Homo sapiens
tctgttgctgcgaactccag

SEQ ID NO: 7163 - DNA, 20 bp, Homo sapiens
gagttcgcagcaacagagct

SEQ ID NO: 7164 - DNA, 20 bp, Homo sapiens
gcaacagagctcggcctcct

SEQ ID NO: 7165 - DNA, 20 bp, Homo sapiens
caacagagctcggcctcctt

SEQ ID NO: 7166 - DNA, 20 bp, Homo sapiens
gccgtttgcggtgcccaagg

SEQ ID NO: 7167 - DNA, 20 bp, Homo sapiens
agtgccgtttgcggtgccca

SEQ ID NO: 7168 - DNA, 20 bp, Homo sapiens
gcctccttgggcaccgcaaa

SEQ ID NO: 7169 - DNA, 20 bp, Homo sapiens
tggaggctgagtgccgtttg

SEQ ID NO: 7170 - DNA, 20 bp, Homo sapiens
gcaaacggcactcagcctcc

SEQ ID NO: 7171 - DNA, 20 bp, Homo sapiens
caaacggcactcagcctcca

SEQ ID NO: 7172 - DNA, 20 bp, Homo sapiens
acgagatggcggttccctgg

SEQ ID NO: 7173 - DNA, 20 bp, Homo sapiens
ggaacgagatggcggttccc

SEQ ID NO: 7174 - DNA, 20 bp, Homo sapiens
ccgcctcaggaacgagatgg

SEQ ID NO: 7175 - DNA, 20 bp, Homo sapiens
tctccgcctcaggaacgaga

SEQ ID NO: 7176 - DNA, 20 bp, Homo sapiens
gaaccgccatctcgttcctg

SEQ ID NO: 7177 - DNA, 20 bp, Homo sapiens
ccgccatctcgttcctgagg

SEQ ID NO: 7178 - DNA, 20 bp, Homo sapiens
taagatgaactctccgcctc

SEQ ID NO: 7179 - DNA, 20 bp, Homo sapiens
gttcatcttaacgagagaaa

SEQ ID NO: 7180 - DNA, 20 bp, Homo sapiens
atcttaacgagagaaatggc

SEQ ID NO: 7181 - DNA, 20 bp, Homo sapiens
tcttaacgagagaaatggca

SEQ ID NO: 7182 - DNA, 20 bp, Homo sapiens
aaatggcagggactgtgaat

SEQ ID NO: 7183 - DNA, 20 bp, Homo sapiens
ggcagggactgtgaataggc

SEQ ID NO: 7184 - DNA, 20 bp, Homo sapiens
gcacccgccaccaaatctgc

SEQ ID NO: 7185 - DNA, 20 bp, Homo sapiens
tgtgaataggccggcagatt

SEQ ID NO: 7186 - DNA, 20 bp, Homo sapiens
gaataggccggcagatttgg

SEQ ID NO: 7187 - DNA, 20 bp, Homo sapiens
taggccggcagatttggtgg

SEQ ID NO: 7188 - DNA, 20 bp, Homo sapiens
aggccggcagatttggtggc

SEQ ID NO: 7189 - DNA, 20 bp, Homo sapiens
gatttggtggcgggtgccac

SEQ ID NO: 7190 - DNA, 20 bp, Homo sapiens
cctgcaggagactgaacctg

SEQ ID NO: 7191 - DNA, 20 bp, Homo sapiens
ccacaggttcagtctcctgc

SEQ ID NO: 7192 - DNA, 20 bp, Homo sapiens
cacaggttcagtctcctgca

SEQ ID NO: 7193 - DNA, 20 bp, Homo sapiens
gcattttctcctctccctgc

SEQ ID NO: 7194 - DNA, 20 bp, Homo sapiens
gttcagtctcctgcagggag

SEQ ID NO: 7195 - DNA, 20 bp, Homo sapiens
gaaaatacaaggaattagta

SEQ ID NO: 7196 - DNA, 20 bp, Homo sapiens
tgtttctctgagaaaataca

SEQ ID NO: 7197 - DNA, 20 bp, Homo sapiens
tattttctcagagaaacaag

SEQ ID NO: 7198 - DNA, 20 bp, Homo sapiens
ccctcacatgaggctgatga

SEQ ID NO: 7199 - DNA, 20 bp, Homo sapiens
accgtcatcagcctcatgtg

SEQ ID NO: 7200 - DNA, 20 bp, Homo sapiens
ctccttcccaccctcacatg

SEQ ID NO: 7201 - DNA, 20 bp, Homo sapiens
ccgtcatcagcctcatgtga

SEQ ID NO: 7202 - DNA, 20 bp, Homo sapiens
tcatcagcctcatgtgaggg

SEQ ID NO: 7203 - DNA, 20 bp, Homo sapiens
catcagcctcatgtgagggt

SEQ ID NO: 7204 - DNA, 20 bp, Homo sapiens
agcctcatgtgagggtggga

SEQ ID NO: 7205 - DNA, 20 bp, Homo sapiens
ctcatgtgagggtgggaagg

SEQ ID NO: 7206 - DNA, 20 bp, Homo sapiens
tcatgtgagggtgggaagga

SEQ ID NO: 7207 - DNA, 20 bp, Homo sapiens
gtgagggtgggaaggaggga

SEQ ID NO: 7208 - DNA, 20 bp, Homo sapiens
tgagggtgggaaggagggat

SEQ ID NO: 7209 - DNA, 20 bp, Homo sapiens
gagggtgggaaggagggatg

SEQ ID NO: 7210 - DNA, 20 bp, Homo sapiens
ggaaggagggatggggtttg

SEQ ID NO: 7211 - DNA, 20 bp, Homo sapiens
gagggatggggtttgcggag

SEQ ID NO: 7212 - DNA, 20 bp, Homo sapiens
agggatggggtttgcggaga

SEQ ID NO: 7213 - DNA, 20 bp, Homo sapiens
gtttgcggagagggaaagtg

SEQ ID NO: 7214 - DNA, 20 bp, Homo sapiens
cggagagggaaagtgtggta

SEQ ID NO: 7215 - DNA, 20 bp, Homo sapiens
aagtgtggtatggtcatctg

SEQ ID NO: 7216 - DNA, 20 bp, Homo sapiens
agtgtggtatggtcatctgt

SEQ ID NO: 7217 - DNA, 20 bp, Homo sapiens
ggtatggtcatctgtgggag

SEQ ID NO: 7218 - DNA, 20 bp, Homo sapiens
tgggagtggaagagagtgag

SEQ ID NO: 7219 - DNA, 20 bp, Homo sapiens
gggagtggaagagagtgaga

SEQ ID NO: 7220 - DNA, 20 bp, Homo sapiens
gaagagagtgagagggctgc

SEQ ID NO: 7221 - DNA, 20 bp, Homo sapiens
aagagagtgagagggctgca

SEQ ID NO: 7222 - DNA, 20 bp, Homo sapiens
agagagtgagagggctgcag

SEQ ID NO: 7223 - DNA, 20 bp, Homo sapiens
agagggctgcaggggtgcag

SEQ ID NO: 7224 - DNA, 20 bp, Homo sapiens
gagggctgcaggggtgcagc

SEQ ID NO: 7225 - DNA, 20 bp, Homo sapiens
caggggtgcagcgggactgc

SEQ ID NO: 7226 - DNA, 20 bp, Homo sapiens
ggtgcagcgggactgcaggc

SEQ ID NO: 7227 - DNA, 20 bp, Homo sapiens
cgggactgcaggctggcacc

SEQ ID NO: 7228 - DNA, 20 bp, Homo sapiens
gggactgcaggctggcacca

SEQ ID NO: 7229 - DNA, 20 bp, Homo sapiens
actacaagccctagggaccc

SEQ ID NO: 7230 - DNA, 20 bp, Homo sapiens
aggctggcaccagggtccct

SEQ ID NO: 7231 - DNA, 20 bp, Homo sapiens
ggctggcaccagggtcccta

SEQ ID NO: 7232 - DNA, 20 bp, Homo sapiens
tccaccaactacaagcccta

SEQ ID NO: 7233 - DNA, 20 bp, Homo sapiens
ttccaccaactacaagccct

SEQ ID NO: 7234 - DNA, 20 bp, Homo sapiens
gggtccctagggcttgtagt

SEQ ID NO: 7235 - DNA, 20 bp, Homo sapiens
tccctagggcttgtagttgg

SEQ ID NO: 7236 - DNA, 20 bp, Homo sapiens
tggaaagtgcatcagtgacc

SEQ ID NO: 7237 - DNA, 20 bp, Homo sapiens
ggaaagtgcatcagtgacca

SEQ ID NO: 7238 - DNA, 20 bp, Homo sapiens
ggagcagctgcacacagccc

SEQ ID NO: 7239 - DNA, 20 bp, Homo sapiens
gggctgtgtgcagctgctcc

SEQ ID NO: 7240 - DNA, 20 bp, Homo sapiens
tgtgtgcagctgctccaggc

SEQ ID NO: 7241 - DNA, 20 bp, Homo sapiens
ctgcttcttccacacctgcc

SEQ ID NO: 7242 - DNA, 20 bp, Homo sapiens
gcagctgctccaggcaggtg

SEQ ID NO: 7243 - DNA, 20 bp, Homo sapiens
agagttgaacttgcccagcc

SEQ ID NO: 7244 - DNA, 20 bp, Homo sapiens
tctgggcagcactccaggct

SEQ ID NO: 7245 - DNA, 20 bp, Homo sapiens
ctctgggcagcactccaggc

SEQ ID NO: 7246 - DNA, 20 bp, Homo sapiens
ctcactctgggcagcactcc

SEQ ID NO: 7247 - DNA, 20 bp, Homo sapiens
ctgggctttgggctcactct

SEQ ID NO: 7248 - DNA, 20 bp, Homo sapiens
cctgggctttgggctcactc

SEQ ID NO: 7249 - DNA, 20 bp, Homo sapiens
tctggtctcccctgggcttt

SEQ ID NO: 7250 - DNA, 20 bp, Homo sapiens
ccagagtgagcccaaagccc

SEQ ID NO: 7251 - DNA, 20 bp, Homo sapiens
ctctggtctcccctgggctt

SEQ ID NO: 7252 - DNA, 20 bp, Homo sapiens
cagagtgagcccaaagccca

SEQ ID NO: 7253 - DNA, 20 bp, Homo sapiens
agagtgagcccaaagcccag

SEQ ID NO: 7254 - DNA, 20 bp, Homo sapiens
ccccatctctggtctcccct

SEQ ID NO: 7255 - DNA, 20 bp, Homo sapiens
gccccatctctggtctcccc

SEQ ID NO: 7256 - DNA, 20 bp, Homo sapiens
agcccaggggagaccagaga

SEQ ID NO: 7257 - DNA, 20 bp, Homo sapiens
gcccaggggagaccagagat

SEQ ID NO: 7258 - DNA, 20 bp, Homo sapiens
cccaggggagaccagagatg

SEQ ID NO: 7259 - DNA, 20 bp, Homo sapiens
tttgcaaacagccccatctc

SEQ ID NO: 7260 - DNA, 20 bp, Homo sapiens
agagatggggctgtttgcaa

SEQ ID NO: 7261 - DNA, 20 bp, Homo sapiens
gatggggctgtttgcaaagg

SEQ ID NO: 7262 - DNA, 20 bp, Homo sapiens
ttaaccagctcagattttgt

SEQ ID NO: 7263 - DNA, 20 bp, Homo sapiens
cttaaccagctcagattttg

SEQ ID NO: 7264 - DNA, 20 bp, Homo sapiens
gtagcccacaaaatctgagc

SEQ ID NO: 7265 - DNA, 20 bp, Homo sapiens
aaatctgagctggttaagaa

SEQ ID NO: 7266 - DNA, 20 bp, Homo sapiens
gaaaggagagagagtgaaaa

SEQ ID NO: 7267 - DNA, 20 bp, Homo sapiens
aaaggagagagagtgaaaat

SEQ ID NO: 7268 - DNA, 20 bp, Homo sapiens
aaggagagagagtgaaaatg

SEQ ID NO: 7269 - DNA, 20 bp, Homo sapiens
tgaaaatggggagcccagcc

SEQ ID NO: 7270 - DNA, 20 bp, Homo sapiens
tgtacccaggctgccaggct

SEQ ID NO: 7271 - DNA, 20 bp, Homo sapiens
gtgtacccaggctgccaggc

SEQ ID NO: 7272 - DNA, 20 bp, Homo sapiens
agatgtgtacccaggctgcc

SEQ ID NO: 7273 - DNA, 20 bp, Homo sapiens
gggagcccagcctggcagcc

SEQ ID NO: 7274 - DNA, 20 bp, Homo sapiens
ggagcccagcctggcagcct

SEQ ID NO: 7275 - DNA, 20 bp, Homo sapiens
ttgagctgagatgtgtaccc

SEQ ID NO: 7276 - DNA, 20 bp, Homo sapiens
caaatggattcagctagtgt

SEQ ID NO: 7277 - DNA, 20 bp, Homo sapiens
ccaaatggattcagctagtg

SEQ ID NO: 7278 - DNA, 20 bp, Homo sapiens
ccacactagctgaatccatt

SEQ ID NO: 7279 - DNA, 20 bp, Homo sapiens
cacactagctgaatccattt

SEQ ID NO: 7280 - DNA, 20 bp, Homo sapiens
ggtcaacgaaggggcccaaa

SEQ ID NO: 7281 - DNA, 20 bp, Homo sapiens
gcacagagaggtcaacgaag

SEQ ID NO: 7282 - DNA, 20 bp, Homo sapiens
ggcacagagaggtcaacgaa

SEQ ID NO: 7283 - DNA, 20 bp, Homo sapiens
aggcacagagaggtcaacga

SEQ ID NO: 7284 - DNA, 20 bp, Homo sapiens
agggaaactgaggcacagag

SEQ ID NO: 7285 - DNA, 20 bp, Homo sapiens
ttctatagatagggaaactg

SEQ ID NO: 7286 - DNA, 20 bp, Homo sapiens
ttatccccattctatagata

SEQ ID NO: 7287 - DNA, 20 bp, Homo sapiens
cttatccccattctatagat

SEQ ID NO: 7288 - DNA, 20 bp, Homo sapiens
cagtttccctatctatagaa

SEQ ID NO: 7289 - DNA, 20 bp, Homo sapiens
agtttccctatctatagaat

SEQ ID NO: 7290 - DNA, 20 bp, Homo sapiens
gtttccctatctatagaatg

SEQ ID NO: 7291 - DNA, 20 bp, Homo sapiens
atagaatggggataagaata

SEQ ID NO: 7292 - DNA, 20 bp, Homo sapiens
taagaataaggctacttcct

SEQ ID NO: 7293 - DNA, 20 bp, Homo sapiens
aagaataaggctacttccta

SEQ ID NO: 7294 - DNA, 20 bp, Homo sapiens
tcaatcctcacaacagccct

SEQ ID NO: 7295 - DNA, 20 bp, Homo sapiens
tacttcctagggctgttgtg

SEQ ID NO: 7296 - DNA, 20 bp, Homo sapiens
ttcaaaattgaacaagtgtt

SEQ ID NO: 7297 - DNA, 20 bp, Homo sapiens
aacactgttctaaagcattt

SEQ ID NO: 7298 - DNA, 20 bp, Homo sapiens
aaagcatttaggacagtgcc

SEQ ID NO: 7299 - DNA, 20 bp, Homo sapiens
atttaggacagtgcctggca

SEQ ID NO: 7300 - DNA, 20 bp, Homo sapiens
tttaggacagtgcctggcat

SEQ ID NO: 7301 - DNA, 20 bp, Homo sapiens
ttaggacagtgcctggcatg

SEQ ID NO: 7302 - DNA, 20 bp, Homo sapiens
cgcaacacttaccccatgcc

SEQ ID NO: 7303 - DNA, 20 bp, Homo sapiens
ctggcatggggtaagtgttg

SEQ ID NO: 7304 - DNA, 20 bp, Homo sapiens
tcaacgcagcctgagaacaa

SEQ ID NO: 7305 - DNA, 20 bp, Homo sapiens
tcatcatcaccattgttctc

SEQ ID NO: 7306 - DNA, 20 bp, Homo sapiens
tgttctcaggctgcgttgat

SEQ ID NO: 7307 - DNA, 20 bp, Homo sapiens
gcgttgattggagctgctga

SEQ ID NO: 7308 - DNA, 20 bp, Homo sapiens
cgttgattggagctgctgaa

SEQ ID NO: 7309 - DNA, 20 bp, Homo sapiens
tgattggagctgctgaaggg

SEQ ID NO: 7310 - DNA, 20 bp, Homo sapiens
tgctgaagggaggcaattta

SEQ ID NO: 7311 - DNA, 20 bp, Homo sapiens
ggcaatttaaggaagtgagc

SEQ ID NO: 7312 - DNA, 20 bp, Homo sapiens
accaccacctcctatctgtc

SEQ ID NO: 7313 - DNA, 20 bp, Homo sapiens
aggaagtgagccggacagat

SEQ ID NO: 7314 - DNA, 20 bp, Homo sapiens
aagtgagccggacagatagg

SEQ ID NO: 7315 - DNA, 20 bp, Homo sapiens
tgagccggacagataggagg

SEQ ID NO: 7316 - DNA, 20 bp, Homo sapiens
gccggacagataggaggtgg

SEQ ID NO: 7317 - DNA, 20 bp, Homo sapiens
ggacagataggaggtggtgg

SEQ ID NO: 7318 - DNA, 20 bp, Homo sapiens
aggaggtggtggtggttatc

SEQ ID NO: 7319 - DNA, 20 bp, Homo sapiens
aggtgcgatgcttgaaactg

SEQ ID NO: 7320 - DNA, 20 bp, Homo sapiens
gatgcttgaaactgaggctt

SEQ ID NO: 7321 - DNA, 20 bp, Homo sapiens
gcttgaaactgaggcttcgg

SEQ ID NO: 7322 - DNA, 20 bp, Homo sapiens
gcttcggaggcaacagttac

SEQ ID NO: 7323 - DNA, 20 bp, Homo sapiens
aacagttactggtaatgaca

SEQ ID NO: 7324 - DNA, 20 bp, Homo sapiens
actggtaatgacaaggtcta

SEQ ID NO: 7325 - DNA, 20 bp, Homo sapiens
caaggtctaaggcttgacag

SEQ ID NO: 7326 - DNA, 20 bp, Homo sapiens
aaggtctaaggcttgacagt

SEQ ID NO: 7327 - DNA, 20 bp, Homo sapiens
gtctaaggcttgacagtggg

SEQ ID NO: 7328 - DNA, 20 bp, Homo sapiens
gggtggcagaagtgtaacgc

SEQ ID NO: 7329 - DNA, 20 bp, Homo sapiens
ggtggcagaagtgtaacgca

SEQ ID NO: 7330 - DNA, 20 bp, Homo sapiens
aacgcagggaaagagacgag

SEQ ID NO: 7331 - DNA, 20 bp, Homo sapiens
gggaaagagacgagcggtca

SEQ ID NO: 7332 - DNA, 20 bp, Homo sapiens
cgagcggtcaaggagccgag

SEQ ID NO: 7333 - DNA, 20 bp, Homo sapiens
gagcggtcaaggagccgaga

SEQ ID NO: 7334 - DNA, 20 bp, Homo sapiens
ccacccaactccttccctct

SEQ ID NO: 7335 - DNA, 20 bp, Homo sapiens
ggtcaaggagccgagaggga

SEQ ID NO: 7336 - DNA, 20 bp, Homo sapiens
ggagccgagagggaaggagt

SEQ ID NO: 7337 - DNA, 20 bp, Homo sapiens
gagccgagagggaaggagtt

SEQ ID NO: 7338 - DNA, 20 bp, Homo sapiens
ccgagagggaaggagttggg

SEQ ID NO: 7339 - DNA, 20 bp, Homo sapiens
gggtggactaagatcatttg

SEQ ID NO: 7340 - DNA, 20 bp, Homo sapiens
gatcatttgtggaagaatga

SEQ ID NO: 7341 - DNA, 20 bp, Homo sapiens
tggaagaatgatggagagaa

SEQ ID NO: 7342 - DNA, 20 bp, Homo sapiens
atgatggagagaaaggctga

SEQ ID NO: 7343 - DNA, 20 bp, Homo sapiens
tgatggagagaaaggctgaa

SEQ ID NO: 7344 - DNA, 20 bp, Homo sapiens
ggagagaaaggctgaagggc

SEQ ID NO: 7345 - DNA, 20 bp, Homo sapiens
gagagaaaggctgaagggca

SEQ ID NO: 7346 - DNA, 20 bp, Homo sapiens
agagaaaggctgaagggcag

SEQ ID NO: 7347 - DNA, 20 bp, Homo sapiens
tgacatcatcagtgaccaag

SEQ ID NO: 7348 - DNA, 20 bp, Homo sapiens
catcatcagtgaccaagagg

SEQ ID NO: 7349 - DNA, 20 bp, Homo sapiens
tcagcctcccggccgcctct

SEQ ID NO: 7350 - DNA, 20 bp, Homo sapiens
atcagtgaccaagaggcggc

SEQ ID NO: 7351 - DNA, 20 bp, Homo sapiens
tcagtgaccaagaggcggcc

SEQ ID NO: 7352 - DNA, 20 bp, Homo sapiens
gtgaccaagaggcggccggg

SEQ ID NO: 7353 - DNA, 20 bp, Homo sapiens
ttgctgtggtctcagcctcc

SEQ ID NO: 7354 - DNA, 20 bp, Homo sapiens
acactctccctttcttgctg

SEQ ID NO: 7355 - DNA, 20 bp, Homo sapiens
ggctgagaccacagcaagaa

SEQ ID NO: 7356 - DNA, 20 bp, Homo sapiens
gctgagaccacagcaagaaa

SEQ ID NO: 7357 - DNA, 20 bp, Homo sapiens
gcaagaaagggagagtgtga

SEQ ID NO: 7358 - DNA, 20 bp, Homo sapiens
gtgtgatggcatcttcttca

SEQ ID NO: 7359 - DNA, 20 bp, Homo sapiens
tgtgatggcatcttcttcaa

SEQ ID NO: 7360 - DNA, 20 bp, Homo sapiens
ggcatcttcttcaagggagc

SEQ ID NO: 7361 - DNA, 20 bp, Homo sapiens
gcatcttcttcaagggagct

SEQ ID NO: 7362 - DNA, 20 bp, Homo sapiens
catcttcttcaagggagctg

SEQ ID NO: 7363 - DNA, 20 bp, Homo sapiens
tcaagggagctggggatgtt

SEQ ID NO: 7364 - DNA, 20 bp, Homo sapiens
caagggagctggggatgttt

SEQ ID NO: 7365 - DNA, 20 bp, Homo sapiens
aagggagctggggatgtttg

SEQ ID NO: 7366 - DNA, 20 bp, Homo sapiens
ggagctggggatgtttgggg

SEQ ID NO: 7367 - DNA, 20 bp, Homo sapiens
tggggtggaaaaaagaacaa

SEQ ID NO: 7368 - DNA, 20 bp, Homo sapiens
tggaaaaaagaacaatggtc

SEQ ID NO: 7369 - DNA, 20 bp, Homo sapiens
ggaaaaaagaacaatggtct

SEQ ID NO: 7370 - DNA, 20 bp, Homo sapiens
aaaaagaacaatggtctggg

SEQ ID NO: 7371 - DNA, 20 bp, Homo sapiens
aaaagaacaatggtctggga

SEQ ID NO: 7372 - DNA, 20 bp, Homo sapiens
caatggtctgggagggaata

SEQ ID NO: 7373 - DNA, 20 bp, Homo sapiens
aatggtctgggagggaatat

SEQ ID NO: 7374 - DNA, 20 bp, Homo sapiens
ttttttttttttttttgaga

SEQ ID NO: 7375 - DNA, 20 bp, Homo sapiens
gagtttcgctgttgtcatcc

SEQ ID NO: 7376 - DNA, 20 bp, Homo sapiens
ttcgctgttgtcatccaggc

SEQ ID NO: 7377 - DNA, 20 bp, Homo sapiens
tgcaacattgcaatccagcc

SEQ ID NO: 7378 - DNA, 20 bp, Homo sapiens
ggattgcaatgttgcaatct

SEQ ID NO: 7379 - DNA, 20 bp, Homo sapiens
cactgcaacttctgccttcc

SEQ ID NO: 7380 - DNA, 20 bp, Homo sapiens
gagaatcacttgaacctgga

SEQ ID NO: 7381 - DNA, 20 bp, Homo sapiens
acaggagaatcacttgaacc

SEQ ID NO: 7382 - DNA, 20 bp, Homo sapiens
gctactcgggaagctgagac

SEQ ID NO: 7383 - DNA, 20 bp, Homo sapiens
gcctgtaatctcagctactc

SEQ ID NO: 7384 - DNA, 20 bp, Homo sapiens
tgcctgtaatctcagctact

SEQ ID NO: 7385 - DNA, 20 bp, Homo sapiens
tcccgagtagctgagattac

SEQ ID NO: 7386 - DNA, 20 bp, Homo sapiens
caaaagtaagccaggcgtgg

SEQ ID NO: 7387 - DNA, 20 bp, Homo sapiens
caggcacacaccaccacgcc

SEQ ID NO: 7388 - DNA, 20 bp, Homo sapiens
atacaaaagtaagccaggcg

SEQ ID NO: 7389 - DNA, 20 bp, Homo sapiens
taaaaatacaaaagtaagcc

SEQ ID NO: 7390 - DNA, 20 bp, Homo sapiens
ttttgtatttttagtagaga

SEQ ID NO: 7391 - DNA, 20 bp, Homo sapiens
gagacggagttttgccatgt

SEQ ID NO: 7392 - DNA, 20 bp, Homo sapiens
tgagaccagcctggccaaca

SEQ ID NO: 7393 - DNA, 20 bp, Homo sapiens
ggagttttgccatgttggcc

SEQ ID NO: 7394 - DNA, 20 bp, Homo sapiens
ttttgccatgttggccaggc

SEQ ID NO: 7395 - DNA, 20 bp, Homo sapiens
tcaggagtttgagaccagcc

SEQ ID NO: 7396 - DNA, 20 bp, Homo sapiens
ggtctcaaactcctgacctc

SEQ ID NO: 7397 - DNA, 20 bp, Homo sapiens
cgggtggatcacctgaggtc

SEQ ID NO: 7398 - DNA, 20 bp, Homo sapiens
caaggcgggtggatcacctg

SEQ ID NO: 7399 - DNA, 20 bp, Homo sapiens
ctttgggaggccaaggcggg

SEQ ID NO: 7400 - DNA, 20 bp, Homo sapiens
ctcaggtgatccacccgcct

SEQ ID NO: 7401 - DNA, 20 bp, Homo sapiens
gcactttgggaggccaaggc

SEQ ID NO: 7402 - DNA, 20 bp, Homo sapiens
agcactttgggaggccaagg

SEQ ID NO: 7403 - DNA, 20 bp, Homo sapiens
cccagcactttgggaggcca

SEQ ID NO: 7404 - DNA, 20 bp, Homo sapiens
tctaatcccagcactttggg

SEQ ID NO: 7405 - DNA, 20 bp, Homo sapiens
acctctaatcccagcacttt

SEQ ID NO: 7406 - DNA, 20 bp, Homo sapiens
gccttggcctcccaaagtgc

SEQ ID NO: 7407 - DNA, 20 bp, Homo sapiens
cacctctaatcccagcactt

SEQ ID NO: 7408 - DNA, 20 bp, Homo sapiens
ccttggcctcccaaagtgct

SEQ ID NO: 7409 - DNA, 20 bp, Homo sapiens
tcccaaagtgctgggattag

SEQ ID NO: 7410 - DNA, 20 bp, Homo sapiens
aacttccaggctgggcgcgg

SEQ ID NO: 7411 - DNA, 20 bp, Homo sapiens
acaaacttccaggctgggcg

SEQ ID NO: 7412 - DNA, 20 bp, Homo sapiens
gtgagccaccgcgcccagcc

SEQ ID NO: 7413 - DNA, 20 bp, Homo sapiens
taaatacaaacttccaggct

SEQ ID NO: 7414 - DNA, 20 bp, Homo sapiens
ataaatacaaacttccaggc

SEQ ID NO: 7415 - DNA, 20 bp, Homo sapiens
attaataaatacaaacttcc

SEQ ID NO: 7416 - DNA, 20 bp, Homo sapiens
agtttgtatttattaatttt

SEQ ID NO: 7417 - DNA, 20 bp, Homo sapiens
atgtacactgaagtatttag

SEQ ID NO: 7418 - DNA, 20 bp, Homo sapiens
aatgtacactgaagtattta

SEQ ID NO: 7419 - DNA, 20 bp, Homo sapiens
aaatgtacactgaagtattt

SEQ ID NO: 7420 - DNA, 20 bp, Homo sapiens
actccagcctgggtgattga

SEQ ID NO: 7421 - DNA, 20 bp, Homo sapiens
tcttgctccatcaatcaccc

SEQ ID NO: 7422 - DNA, 20 bp, Homo sapiens
gctccatcaatcacccaggc

SEQ ID NO: 7423 - DNA, 20 bp, Homo sapiens
acaccaccgcactccagcct

SEQ ID NO: 7424 - DNA, 20 bp, Homo sapiens
cacaccaccgcactccagcc

SEQ ID NO: 7425 - DNA, 20 bp, Homo sapiens
caatcacccaggctggagtg

SEQ ID NO: 7426 - DNA, 20 bp, Homo sapiens
tcacccaggctggagtgcgg

SEQ ID NO: 7427 - DNA, 20 bp, Homo sapiens
ggagtgcggtggtgtgatct

SEQ ID NO: 7428 - DNA, 20 bp, Homo sapiens
tgcttgaatccaggaggcgg

SEQ ID NO: 7429 - DNA, 20 bp, Homo sapiens
tcactgcaacctccgcctcc

SEQ ID NO: 7430 - DNA, 20 bp, Homo sapiens
aattgcttgaatccaggagg

SEQ ID NO: 7431 - DNA, 20 bp, Homo sapiens
aagaattgcttgaatccagg

SEQ ID NO: 7432 - DNA, 20 bp, Homo sapiens
cacaagaattgcttgaatcc

SEQ ID NO: 7433 - DNA, 20 bp, Homo sapiens
cccagctactcgggagggtg

SEQ ID NO: 7434 - DNA, 20 bp, Homo sapiens
ctaatcccagctactcggga

SEQ ID NO: 7435 - DNA, 20 bp, Homo sapiens
cctaatcccagctactcggg

SEQ ID NO: 7436 - DNA, 20 bp, Homo sapiens
gcccctaatcccagctactc

SEQ ID NO: 7437 - DNA, 20 bp, Homo sapiens
gcctcaccctcccgagtagc

SEQ ID NO: 7438 - DNA, 20 bp, Homo sapiens
tgcccctaatcccagctact

SEQ ID NO: 7439 - DNA, 20 bp, Homo sapiens
cctcaccctcccgagtagct

SEQ ID NO: 7440 - DNA, 20 bp, Homo sapiens
cctcccgagtagctgggatt

SEQ ID NO: 7441 - DNA, 20 bp, Homo sapiens
ctcccgagtagctgggatta

SEQ ID NO: 7442 - DNA, 20 bp, Homo sapiens
tcccgagtagctgggattag

SEQ ID NO: 7443 - DNA, 20 bp, Homo sapiens
caaaaattaactgggcatgg

SEQ ID NO: 7444 - DNA, 20 bp, Homo sapiens
atacaaaaattaactgggca

SEQ ID NO: 7445 - DNA, 20 bp, Homo sapiens
taaaaatacaaaaattaact

SEQ ID NO: 7446 - DNA, 20 bp, Homo sapiens
ctaaaaatacaaaaattaac

SEQ ID NO: 7447 - DNA, 20 bp, Homo sapiens
ttttgtatttttagtagaga

SEQ ID NO: 7448 - DNA, 20 bp, Homo sapiens
gagatggagtttcaccatat

SEQ ID NO: 7449 - DNA, 20 bp, Homo sapiens
caagaccagcctggccaata

SEQ ID NO: 7450 - DNA, 20 bp, Homo sapiens
ggagtttcaccatattggcc

SEQ ID NO: 7451 - DNA, 20 bp, Homo sapiens
tttcaccatattggccaggc

SEQ ID NO: 7452 - DNA, 20 bp, Homo sapiens
ccaggagctcaagaccagcc

SEQ ID NO: 7453 - DNA, 20 bp, Homo sapiens
ccaggctggtcttgagctcc

SEQ ID NO: 7454 - DNA, 20 bp, Homo sapiens
caggtggatcaactgaggcc

SEQ ID NO: 7455 - DNA, 20 bp, Homo sapiens
tgagacaggtggatcaactg

SEQ ID NO: 7456 - DNA, 20 bp, Homo sapiens
atttgggaggctgagacagg

SEQ ID NO: 7457 - DNA, 20 bp, Homo sapiens
gcaatttgggaggctgagac

SEQ ID NO: 7458 - DNA, 20 bp, Homo sapiens
tgtaatctcagcaatttggg

SEQ ID NO: 7459 - DNA, 20 bp, Homo sapiens
gcctgtaatctcagcaattt

SEQ ID NO: 7460 - DNA, 20 bp, Homo sapiens
cgcctgtaatctcagcaatt

SEQ ID NO: 7461 - DNA, 20 bp, Homo sapiens
tcccaaattgctgagattac

SEQ ID NO: 7462 - DNA, 20 bp, Homo sapiens
aattgctgagattacaggcg

SEQ ID NO: 7463 - DNA, 20 bp, Homo sapiens
attgctgagattacaggcgt

SEQ ID NO: 7464 - DNA, 20 bp, Homo sapiens
tacactgaggccggttatgg

SEQ ID NO: 7465 - DNA, 20 bp, Homo sapiens
caggcgtgggccaccataac

SEQ ID NO: 7466 - DNA, 20 bp, Homo sapiens
atatacactgaggccggtta

SEQ ID NO: 7467 - DNA, 20 bp, Homo sapiens
tcagaaatatacactgaggc

SEQ ID NO: 7468 - DNA, 20 bp, Homo sapiens
tgcatcagaaatatacactg

SEQ ID NO: 7469 - DNA, 20 bp, Homo sapiens
gtgtatatttctgatgcagt

SEQ ID NO: 7470 - DNA, 20 bp, Homo sapiens
tgtatatttctgatgcagtt

SEQ ID NO: 7471 - DNA, 20 bp, Homo sapiens
attcgagatgagattggagg

SEQ ID NO: 7472 - DNA, 20 bp, Homo sapiens
aattcgagatgagattggag

SEQ ID NO: 7473 - DNA, 20 bp, Homo sapiens
caattcgagatgagattgga

SEQ ID NO: 7474 - DNA, 20 bp, Homo sapiens
acaattcgagatgagattgg

SEQ ID NO: 7475 - DNA, 20 bp, Homo sapiens
attacaattcgagatgagat

SEQ ID NO: 7476 - DNA, 20 bp, Homo sapiens
ggtcatgccctcaacacgtg

SEQ ID NO: 7477 - DNA, 20 bp, Homo sapiens
aggtcatgccctcaacacgt

SEQ ID NO: 7478 - DNA, 20 bp, Homo sapiens
gaggtcatgccctcaacacg

SEQ ID NO: 7479 - DNA, 20 bp, Homo sapiens
attgtaatccccacgtgttg

SEQ ID NO: 7480 - DNA, 20 bp, Homo sapiens
ttgtaatccccacgtgttga

SEQ ID NO: 7481 - DNA, 20 bp, Homo sapiens
gtgttgagggcatgacctcg

SEQ ID NO: 7482 - DNA, 20 bp, Homo sapiens
tgttgagggcatgacctcgt

SEQ ID NO: 7483 - DNA, 20 bp, Homo sapiens
tgagggcatgacctcgtggg

SEQ ID NO: 7484 - DNA, 20 bp, Homo sapiens
tgatccaatcacctcccacg

SEQ ID NO: 7485 - DNA, 20 bp, Homo sapiens
atgacctcgtgggaggtgat

SEQ ID NO: 7486 - DNA, 20 bp, Homo sapiens
gtgggaggtgattggatcac

SEQ ID NO: 7487 - DNA, 20 bp, Homo sapiens
tgggaggtgattggatcaca

SEQ ID NO: 7488 - DNA, 20 bp, Homo sapiens
gggaggtgattggatcacag

SEQ ID NO: 7489 - DNA, 20 bp, Homo sapiens
aggtgattggatcacagggg

SEQ ID NO: 7490 - DNA, 20 bp, Homo sapiens
ctgtcacaagaacagcatgg

SEQ ID NO: 7491 - DNA, 20 bp, Homo sapiens
actgtcacaagaacagcatg

SEQ ID NO: 7492 - DNA, 20 bp, Homo sapiens
cactgtcacaagaacagcat

SEQ ID NO: 7493 - DNA, 20 bp, Homo sapiens
tcactgtcacaagaacagca

SEQ ID NO: 7494 - DNA, 20 bp, Homo sapiens
gctgttcttgtgacagtgag

SEQ ID NO: 7495 - DNA, 20 bp, Homo sapiens
ctgttcttgtgacagtgagt

SEQ ID NO: 7496 - DNA, 20 bp, Homo sapiens
gtgacagtgagtgggttttc

SEQ ID NO: 7497 - DNA, 20 bp, Homo sapiens
tgggttttcaggagagctga

SEQ ID NO: 7498 - DNA, 20 bp, Homo sapiens
gagctgatggtttgaaagtg

SEQ ID NO: 7499 - DNA, 20 bp, Homo sapiens
agagagagagaaagagagag

SEQ ID NO: 7500 - DNA, 20 bp, Homo sapiens
ggcacatcttacgtggtgtc

SEQ ID NO: 7501 - DNA, 20 bp, Homo sapiens
gaagcaaggcacatcttacg

SEQ ID NO: 7502 - DNA, 20 bp, Homo sapiens
tggaaggtgaaagggaagca

SEQ ID NO: 7503 - DNA, 20 bp, Homo sapiens
aatcatggtggaaggtgaaa

SEQ ID NO: 7504 - DNA, 20 bp, Homo sapiens
caatcatggtggaaggtgaa

SEQ ID NO: 7505 - DNA, 20 bp, Homo sapiens
aaacttacaatcatggtgga

SEQ ID NO: 7506 - DNA, 20 bp, Homo sapiens
caggaaacttacaatcatgg

SEQ ID NO: 7507 - DNA, 20 bp, Homo sapiens
cctcaggaaacttacaatca

SEQ ID NO: 7508 - DNA, 20 bp, Homo sapiens
ccatgattgtaagtttcctg

SEQ ID NO: 7509 - DNA, 20 bp, Homo sapiens
ggcatggccggggaggcctc

SEQ ID NO: 7510 - DNA, 20 bp, Homo sapiens
taagtttcctgaggcctccc

SEQ ID NO: 7511 - DNA, 20 bp, Homo sapiens
acagtttggcatggccgggg

SEQ ID NO: 7512 - DNA, 20 bp, Homo sapiens
ctcacagtttggcatggccg

SEQ ID NO: 7513 - DNA, 20 bp, Homo sapiens
actcacagtttggcatggcc

SEQ ID NO: 7514 - DNA, 20 bp, Homo sapiens
gactcacagtttggcatggc

SEQ ID NO: 7515 - DNA, 20 bp, Homo sapiens
aattgactcacagtttggca

SEQ ID NO: 7516 - DNA, 20 bp, Homo sapiens
ggctgaattgactcacagtt

SEQ ID NO: 7517 - DNA, 20 bp, Homo sapiens
gcgtaatttataaacaaaag

SEQ ID NO: 7518 - DNA, 20 bp, Homo sapiens
tttataaattacgcagtctc

SEQ ID NO: 7519 - DNA, 20 bp, Homo sapiens
taacacaatttcctaaaaca

SEQ ID NO: 7520 - DNA, 20 bp, Homo sapiens
agagaatgtccccttgtttt

SEQ ID NO: 7521 - DNA, 20 bp, Homo sapiens
aacacaatttcctaaaacaa

SEQ ID NO: 7522 - DNA, 20 bp, Homo sapiens
acacaatttcctaaaacaag

SEQ ID NO: 7523 - DNA, 20 bp, Homo sapiens
catttttgttaactgaaaaa

SEQ ID NO: 7524 - DNA, 20 bp, Homo sapiens
aaattggtgaaatgagaata

SEQ ID NO: 7525 - DNA, 20 bp, Homo sapiens
aaagatattattgagaaaat

SEQ ID NO: 7526 - DNA, 20 bp, Homo sapiens
aaaaaaatatatattttttg

SEQ ID NO: 7527 - DNA, 20 bp, Homo sapiens
atatatattttttgtggtcg

SEQ ID NO: 7528 - DNA, 20 bp, Homo sapiens
cttattaaattccatcaatc

SEQ ID NO: 7529 - DNA, 20 bp, Homo sapiens
aagaaactgctccagattga

SEQ ID NO: 7530 - DNA, 20 bp, Homo sapiens
cgaaacttcaaaacatgtca

SEQ ID NO: 7531 - DNA, 20 bp, Homo sapiens
cccacattctacaaaagaac

SEQ ID NO: 7532 - DNA, 20 bp, Homo sapiens
gccagttcttttgtagaatg

SEQ ID NO: 7533 - DNA, 20 bp, Homo sapiens
ccagttcttttgtagaatgt

SEQ ID NO: 7534 - DNA, 20 bp, Homo sapiens
atacccacaatctaatcatg

SEQ ID NO: 7535 - DNA, 20 bp, Homo sapiens
tgttcctcatgattagattg

SEQ ID NO: 7536 - DNA, 20 bp, Homo sapiens
gttcctcatgattagattgt

SEQ ID NO: 7537 - DNA, 20 bp, Homo sapiens
agattgtgggtatgcatttt

SEQ ID NO: 7538 - DNA, 20 bp, Homo sapiens
tgtgggtatgcatttttggt

SEQ ID NO: 7539 - DNA, 20 bp, Homo sapiens
agaagggcacacacggctct

SEQ ID NO: 7540 - DNA, 20 bp, Homo sapiens
tatactaagaagggcacaca

SEQ ID NO: 7541 - DNA, 20 bp, Homo sapiens
ctgatatgatatactaagaa

SEQ ID NO: 7542 - DNA, 20 bp, Homo sapiens
tctgatatgatatactaaga

SEQ ID NO: 7543 - DNA, 20 bp, Homo sapiens
ctatcaatttgccccattac

SEQ ID NO: 7544 - DNA, 20 bp, Homo sapiens
agttaacacacccagtaatg

SEQ ID NO: 7545 - DNA, 20 bp, Homo sapiens
tatcaatttgccccattact

SEQ ID NO: 7546 - DNA, 20 bp, Homo sapiens
cagttaacacacccagtaat

SEQ ID NO: 7547 - DNA, 20 bp, Homo sapiens
acagttaacacacccagtaa

SEQ ID NO: 7548 - DNA, 20 bp, Homo sapiens
ggtgtgttaactgtgatcat

SEQ ID NO: 7549 - DNA, 20 bp, Homo sapiens
gtgtgttaactgtgatcatt

SEQ ID NO: 7550 - DNA, 20 bp, Homo sapiens
ctgtgatcattgggttaaga

SEQ ID NO: 7551 - DNA, 20 bp, Homo sapiens
gggttaagatggtacctgcc

SEQ ID NO: 7552 - DNA, 20 bp, Homo sapiens
ggaaaatagtaactttgcag

SEQ ID NO: 7553 - DNA, 20 bp, Homo sapiens
gatgtttattaattacaaag

SEQ ID NO: 7554 - DNA, 20 bp, Homo sapiens
agatgtttattaattacaaa

SEQ ID NO: 7555 - DNA, 20 bp, Homo sapiens
aagatgtttattaattacaa

SEQ ID NO: 7556 - DNA, 20 bp, Homo sapiens
taattaataaacatcttgtg

SEQ ID NO: 7557 - DNA, 20 bp, Homo sapiens
atgatcaacaggatttctat

SEQ ID NO: 7558 - DNA, 20 bp, Homo sapiens
gtgaaagttggatgatcaac

SEQ ID NO: 7559 - DNA, 20 bp, Homo sapiens
taaaatcagtgggtgaaagt

SEQ ID NO: 7560 - DNA, 20 bp, Homo sapiens
caatgaacactaaaatcagt

SEQ ID NO: 7561 - DNA, 20 bp, Homo sapiens
tcaatgaacactaaaatcag

SEQ ID NO: 7562 - DNA, 20 bp, Homo sapiens
ttatagtactaatttattca

SEQ ID NO: 7563 - DNA, 20 bp, Homo sapiens
attatagtactaatttattc

SEQ ID NO: 7564 - DNA, 20 bp, Homo sapiens
agtactataataattgccaa

SEQ ID NO: 7565 - DNA, 20 bp, Homo sapiens
actataataattgccaatgg

SEQ ID NO: 7566 - DNA, 20 bp, Homo sapiens
tggaattagaaaaccaccat

SEQ ID NO: 7567 - DNA, 20 bp, Homo sapiens
gccaactactgaaggaaaga

SEQ ID NO: 7568 - DNA, 20 bp, Homo sapiens
agaagaatgccaactactga

SEQ ID NO: 7569 - DNA, 20 bp, Homo sapiens
tccatctttccttcagtagt

SEQ ID NO: 7570 - DNA, 20 bp, Homo sapiens
gtagttggcattcttctgta

SEQ ID NO: 7571 - DNA, 20 bp, Homo sapiens
taaataagtacatagatgag

SEQ ID NO: 7572 - DNA, 20 bp, Homo sapiens
tgtacttatttatatcacca

SEQ ID NO: 7573 - DNA, 20 bp, Homo sapiens
gtacttatttatatcaccat

SEQ ID NO: 7574 - DNA, 20 bp, Homo sapiens
aaccggaatccaggagccca

SEQ ID NO: 7575 - DNA, 20 bp, Homo sapiens
tttatatcaccatgggctcc

SEQ ID NO: 7576 - DNA, 20 bp, Homo sapiens
caccatgggctcctggattc

SEQ ID NO: 7577 - DNA, 20 bp, Homo sapiens
aagtgtgtaaaccggaatcc

SEQ ID NO: 7578 - DNA, 20 bp, Homo sapiens
gaaaatggaagtgtgtaaac

SEQ ID NO: 7579 - DNA, 20 bp, Homo sapiens
cagagagaaaaggcagaaaa

SEQ ID NO: 7580 - DNA, 20 bp, Homo sapiens
ttatattaagcagagagaaa

SEQ ID NO: 7581 - DNA, 20 bp, Homo sapiens
ttttctctctgcttaatata

SEQ ID NO: 7582 - DNA, 20 bp, Homo sapiens
cattttcttcctgggaatca

SEQ ID NO: 7583 - DNA, 20 bp, Homo sapiens
acattttcttcctgggaatc

SEQ ID NO: 7584 - DNA, 20 bp, Homo sapiens
atgagaactccctgattccc

SEQ ID NO: 7585 - DNA, 20 bp, Homo sapiens
tctgctgacattttcttcct

SEQ ID NO: 7586 - DNA, 20 bp, Homo sapiens
ctctgctgacattttcttcc

SEQ ID NO: 7587 - DNA, 20 bp, Homo sapiens
aatgtcagcagagctttctt

SEQ ID NO: 7588 - DNA, 20 bp, Homo sapiens
gtcagcagagctttcttagg

SEQ ID NO: 7589 - DNA, 20 bp, Homo sapiens
attcagtgtaagaaccataa

SEQ ID NO: 7590 - DNA, 20 bp, Homo sapiens
actacacagatacaccttta

SEQ ID NO: 7591 - DNA, 20 bp, Homo sapiens
aaaggtgtatctgtgtagta

SEQ ID NO: 7592 - DNA, 20 bp, Homo sapiens
acaaacacaaagaacctcca

SEQ ID NO: 7593 - DNA, 20 bp, Homo sapiens
caaacacaaagaacctccaa

SEQ ID NO: 7594 - DNA, 20 bp, Homo sapiens
gcagcacctcctgcccttgg

SEQ ID NO: 7595 - DNA, 20 bp, Homo sapiens
cacaaagaacctccaagggc

SEQ ID NO: 7596 - DNA, 20 bp, Homo sapiens
ctggcagcacctcctgccct

SEQ ID NO: 7597 - DNA, 20 bp, Homo sapiens
aaagaacctccaagggcagg

SEQ ID NO: 7598 - DNA, 20 bp, Homo sapiens
caggaggtgctgccagactc

SEQ ID NO: 7599 - DNA, 20 bp, Homo sapiens
ttctagtgccctcctgagtc

SEQ ID NO: 7600 - DNA, 20 bp, Homo sapiens
gaggtgctgccagactcagg

SEQ ID NO: 7601 - DNA, 20 bp, Homo sapiens
aggtgctgccagactcagga

SEQ ID NO: 7602 - DNA, 20 bp, Homo sapiens
actcaggagggcactagaac

SEQ ID NO: 7603 - DNA, 20 bp, Homo sapiens
cagactacctgggatctcag

SEQ ID NO: 7604 - DNA, 20 bp, Homo sapiens
tgagaagccactgagatccc

SEQ ID NO: 7605 - DNA, 20 bp, Homo sapiens
atggagagcacagactacct

SEQ ID NO: 7606 - DNA, 20 bp, Homo sapiens
gatggagagcacagactacc

SEQ ID NO: 7607 - DNA, 20 bp, Homo sapiens
agtctgtgctctccatcttt

SEQ ID NO: 7608 - DNA, 20 bp, Homo sapiens
agagaataagagccaaaaga

SEQ ID NO: 7609 - DNA, 20 bp, Homo sapiens
gtacagagatgttagatgta

SEQ ID NO: 7610 - DNA, 20 bp, Homo sapiens
tttttcgctaaagagaaagc

SEQ ID NO: 7611 - DNA, 20 bp, Homo sapiens
aggtggatgggtgggtggag

SEQ ID NO: 7612 - DNA, 20 bp, Homo sapiens
gaggtggatgggtgggtgga

SEQ ID NO: 7613 - DNA, 20 bp, Homo sapiens
ggaggtggatgggtgggtgg

SEQ ID NO: 7614 - DNA, 20 bp, Homo sapiens
agtggaggtggatgggtggg

SEQ ID NO: 7615 - DNA, 20 bp, Homo sapiens
acaagtggaggtggatgggt

SEQ ID NO: 7616 - DNA, 20 bp, Homo sapiens
aacaagtggaggtggatggg

SEQ ID NO: 7617 - DNA, 20 bp, Homo sapiens
aggaacaagtggaggtggat

SEQ ID NO: 7618 - DNA, 20 bp, Homo sapiens
caggaacaagtggaggtgga

SEQ ID NO: 7619 - DNA, 20 bp, Homo sapiens
aatgcaggaacaagtggagg

SEQ ID NO: 7620 - DNA, 20 bp, Homo sapiens
agaaatgcaggaacaagtgg

SEQ ID NO: 7621 - DNA, 20 bp, Homo sapiens
catagaaatgcaggaacaag

SEQ ID NO: 7622 - DNA, 20 bp, Homo sapiens
gatctgggacatagaaatgc

SEQ ID NO: 7623 - DNA, 20 bp, Homo sapiens
agttgttttctgcaggatct

SEQ ID NO: 7624 - DNA, 20 bp, Homo sapiens
gagttgttttctgcaggatc

SEQ ID NO: 7625 - DNA, 20 bp, Homo sapiens
agaaaagagttgttttctgc

SEQ ID NO: 7626 - DNA, 20 bp, Homo sapiens
tagtctcaattctgtagtcc

SEQ ID NO: 7627 - DNA, 20 bp, Homo sapiens
agtctcaattctgtagtcca

SEQ ID NO: 7628 - DNA, 20 bp, Homo sapiens
ctgatcagattctctctccc

SEQ ID NO: 7629 - DNA, 20 bp, Homo sapiens
agagaatctgatcagtcccc

SEQ ID NO: 7630 - DNA, 20 bp, Homo sapiens
gagaatctgatcagtcccct

SEQ ID NO: 7631 - DNA, 20 bp, Homo sapiens
agagtggaaaaatgacccag

SEQ ID NO: 7632 - DNA, 20 bp, Homo sapiens
cagagtggaaaaatgaccca

SEQ ID NO: 7633 - DNA, 20 bp, Homo sapiens
ccagagtggaaaaatgaccc

SEQ ID NO: 7634 - DNA, 20 bp, Homo sapiens
cctgggtcatttttccactc

SEQ ID NO: 7635 - DNA, 20 bp, Homo sapiens
tgtagctgcttggaccagag

SEQ ID NO: 7636 - DNA, 20 bp, Homo sapiens
ccatgccagctgtagctgct

SEQ ID NO: 7637 - DNA, 20 bp, Homo sapiens
ctggtccaagcagctacagc

SEQ ID NO: 7638 - DNA, 20 bp, Homo sapiens
ccaagcagctacagctggca

SEQ ID NO: 7639 - DNA, 20 bp, Homo sapiens
caagcagctacagctggcat

SEQ ID NO: 7640 - DNA, 20 bp, Homo sapiens
tagttcacacagtaaaaaca

SEQ ID NO: 7641 - DNA, 20 bp, Homo sapiens
aaaacatggctgtcaagaag

SEQ ID NO: 7642 - DNA, 20 bp, Homo sapiens
agaagaggagtaaatttcag

SEQ ID NO: 7643 - DNA, 20 bp, Homo sapiens
ggaagaggttcgggctcaca

SEQ ID NO: 7644 - DNA, 20 bp, Homo sapiens
aggaagaggttcgggctcac

SEQ ID NO: 7645 - DNA, 20 bp, Homo sapiens
aacaaagcaggaagaggttc

SEQ ID NO: 7646 - DNA, 20 bp, Homo sapiens
caacaaagcaggaagaggtt

SEQ ID NO: 7647 - DNA, 20 bp, Homo sapiens
gactgcaacaaagcaggaag

SEQ ID NO: 7648 - DNA, 20 bp, Homo sapiens
tatgaagactgcaacaaagc

SEQ ID NO: 7649 - DNA, 20 bp, Homo sapiens
ctttgacttgctagcttaac

SEQ ID NO: 7650 - DNA, 20 bp, Homo sapiens
tgctagcttaactggtctag

SEQ ID NO: 7651 - DNA, 20 bp, Homo sapiens
tagcttaactggtctagagg

SEQ ID NO: 7652 - DNA, 20 bp, Homo sapiens
agcttaactggtctagagga

SEQ ID NO: 7653 - DNA, 20 bp, Homo sapiens
caggctgaattgaagttttg

SEQ ID NO: 7654 - DNA, 20 bp, Homo sapiens
ctcaaaacttcaattcagcc

SEQ ID NO: 7655 - DNA, 20 bp, Homo sapiens
tcaaaacttcaattcagcct

SEQ ID NO: 7656 - DNA, 20 bp, Homo sapiens
ccctcctgctgaagaaaccc

SEQ ID NO: 7657 - DNA, 20 bp, Homo sapiens
tcagcctgggtttcttcagc

SEQ ID NO: 7658 - DNA, 20 bp, Homo sapiens
gcctgggtttcttcagcagg

SEQ ID NO: 7659 - DNA, 20 bp, Homo sapiens
cctgggtttcttcagcagga

SEQ ID NO: 7660 - DNA, 20 bp, Homo sapiens
gtttcttcagcaggagggcc

SEQ ID NO: 7661 - DNA, 20 bp, Homo sapiens
tttcttcagcaggagggccc

SEQ ID NO: 7662 - DNA, 20 bp, Homo sapiens
ttcttcagcaggagggcccg

SEQ ID NO: 7663 - DNA, 20 bp, Homo sapiens
tcttcagcaggagggcccgg

SEQ ID NO: 7664 - DNA, 20 bp, Homo sapiens
tccctggctctggttccccc

SEQ ID NO: 7665 - DNA, 20 bp, Homo sapiens
gtccctggctctggttcccc

SEQ ID NO: 7666 - DNA, 20 bp, Homo sapiens
ggcccgggggaaccagagcc

SEQ ID NO: 7667 - DNA, 20 bp, Homo sapiens
gcccgggggaaccagagcca

SEQ ID NO: 7668 - DNA, 20 bp, Homo sapiens
atgactctggtccctggctc

SEQ ID NO: 7669 - DNA, 20 bp, Homo sapiens
actgaaatgactctggtccc

SEQ ID NO: 7670 - DNA, 20 bp, Homo sapiens
ctggtgcactgaaatgactc

SEQ ID NO: 7671 - DNA, 20 bp, Homo sapiens
ggaatattcatttcttgagc

SEQ ID NO: 7672 - DNA, 20 bp, Homo sapiens
gctcaagaaatgaatattcc

SEQ ID NO: 7673 - DNA, 20 bp, Homo sapiens
acacttggggattcttggcc

SEQ ID NO: 7674 - DNA, 20 bp, Homo sapiens
gaagaacacttggggattct

SEQ ID NO: 7675 - DNA, 20 bp, Homo sapiens
gagttcaggaagaacacttg

SEQ ID NO: 7676 - DNA, 20 bp, Homo sapiens
ggagttcaggaagaacactt

SEQ ID NO: 7677 - DNA, 20 bp, Homo sapiens
aggagttcaggaagaacact

SEQ ID NO: 7678 - DNA, 20 bp, Homo sapiens
actccaccaggaaggagttc

SEQ ID NO: 7679 - DNA, 20 bp, Homo sapiens
gttcttcctgaactccttcc

SEQ ID NO: 7680 - DNA, 20 bp, Homo sapiens
cttcctgaactccttcctgg

SEQ ID NO: 7681 - DNA, 20 bp, Homo sapiens
ctctttgaactccaccagga

SEQ ID NO: 7682 - DNA, 20 bp, Homo sapiens
tcatctctttgaactccacc

SEQ ID NO: 7683 - DNA, 20 bp, Homo sapiens
cctgataagaactgaaaagc

SEQ ID NO: 7684 - DNA, 20 bp, Homo sapiens
tcctgataagaactgaaaag

SEQ ID NO: 7685 - DNA, 20 bp, Homo sapiens
cccgcttttcagttcttatc

SEQ ID NO: 7686 - DNA, 20 bp, Homo sapiens
gccctcagtcatacataaag

SEQ ID NO: 7687 - DNA, 20 bp, Homo sapiens
ttcctctttatgtatgactg

SEQ ID NO: 7688 - DNA, 20 bp, Homo sapiens
tcctctttatgtatgactga

SEQ ID NO: 7689 - DNA, 20 bp, Homo sapiens
tttgtgaagggaacaaatga

SEQ ID NO: 7690 - DNA, 20 bp, Homo sapiens
accaaataaatatttgtgaa

SEQ ID NO: 7691 - DNA, 20 bp, Homo sapiens
taccaaataaatatttgtga

SEQ ID NO: 7692 - DNA, 20 bp, Homo sapiens
tcccttcacaaatatttatt

SEQ ID NO: 7693 - DNA, 20 bp, Homo sapiens
tttggtatttactatatacc

SEQ ID NO: 7694 - DNA, 20 bp, Homo sapiens
ttggtatttactatatacca

SEQ ID NO: 7695 - DNA, 20 bp, Homo sapiens
tccactgccacaagagtccc

SEQ ID NO: 7696 - DNA, 20 bp, Homo sapiens
ctatataccagggactcttg

SEQ ID NO: 7697 - DNA, 20 bp, Homo sapiens
accagggactcttgtggcag

SEQ ID NO: 7698 - DNA, 20 bp, Homo sapiens
agtggaaaatacaactctca

SEQ ID NO: 7699 - DNA, 20 bp, Homo sapiens
catggaacgtctgttccaga

SEQ ID NO: 7700 - DNA, 20 bp, Homo sapiens
ttattggcagtctttccttc

SEQ ID NO: 7701 - DNA, 20 bp, Homo sapiens
ttgcctattttattgtttat

SEQ ID NO: 7702 - DNA, 20 bp, Homo sapiens
ctgccaataaacaataaaat

SEQ ID NO: 7703 - DNA, 20 bp, Homo sapiens
agatatagcatgttagagag

SEQ ID NO: 7704 - DNA, 20 bp, Homo sapiens
ctccatttcatttttatctg

SEQ ID NO: 7705 - DNA, 20 bp, Homo sapiens
taccacagataaaaatgaaa

SEQ ID NO: 7706 - DNA, 20 bp, Homo sapiens
agaaaagaaacacgaaaagt

SEQ ID NO: 7707 - DNA, 20 bp, Homo sapiens
gaaaagaaacacgaaaagtt

SEQ ID NO: 7708 - DNA, 20 bp, Homo sapiens
aaaagaaacacgaaaagttg

SEQ ID NO: 7709 - DNA, 20 bp, Homo sapiens
acacgaaaagttggggagag

SEQ ID NO: 7710 - DNA, 20 bp, Homo sapiens
agagaggataactgtttgag

SEQ ID NO: 7711 - DNA, 20 bp, Homo sapiens
gagaggataactgtttgaga

SEQ ID NO: 7712 - DNA, 20 bp, Homo sapiens
aggataactgtttgagaggg

SEQ ID NO: 7713 - DNA, 20 bp, Homo sapiens
aactgtttgagagggtggcc

SEQ ID NO: 7714 - DNA, 20 bp, Homo sapiens
actgtttgagagggtggcca

SEQ ID NO: 7715 - DNA, 20 bp, Homo sapiens
ctgtttgagagggtggccag

SEQ ID NO: 7716 - DNA, 20 bp, Homo sapiens
tgataagatgaagctgcccc

SEQ ID NO: 7717 - DNA, 20 bp, Homo sapiens
ggcagcttcatcttatcaag

SEQ ID NO: 7718 - DNA, 20 bp, Homo sapiens
gcagcttcatcttatcaaga

SEQ ID NO: 7719 - DNA, 20 bp, Homo sapiens
ttttttgagtacagacctga

SEQ ID NO: 7720 - DNA, 20 bp, Homo sapiens
cttgtgcactcgttaccttc

SEQ ID NO: 7721 - DNA, 20 bp, Homo sapiens
taacgagtgcacaagccata

SEQ ID NO: 7722 - DNA, 20 bp, Homo sapiens
aacgagtgcacaagccatat

SEQ ID NO: 7723 - DNA, 20 bp, Homo sapiens
gctgttctcaggtacccata

SEQ ID NO: 7724 - DNA, 20 bp, Homo sapiens
attgttctgccgctgttctc

SEQ ID NO: 7725 - DNA, 20 bp, Homo sapiens
atatgggtacctgagaacag

SEQ ID NO: 7726 - DNA, 20 bp, Homo sapiens
tgagaacagcggcagaacaa

SEQ ID NO: 7727 - DNA, 20 bp, Homo sapiens
aacagcggcagaacaatggc

SEQ ID NO: 7728 - DNA, 20 bp, Homo sapiens
acagcggcagaacaatggca

SEQ ID NO: 7729 - DNA, 20 bp, Homo sapiens
gcagaacaatggcagggtgc

SEQ ID NO: 7730 - DNA, 20 bp, Homo sapiens
cagaacaatggcagggtgct

SEQ ID NO: 7731 - DNA, 20 bp, Homo sapiens
aacaatggcagggtgctggg

SEQ ID NO: 7732 - DNA, 20 bp, Homo sapiens
acaatggcagggtgctggga

SEQ ID NO: 7733 - DNA, 20 bp, Homo sapiens
acaattctaaacagcgtggc

SEQ ID NO: 7734 - DNA, 20 bp, Homo sapiens
gctgacaattctaaacagcg

SEQ ID NO: 7735 - DNA, 20 bp, Homo sapiens
tgtttagaattgtcagcaca

SEQ ID NO: 7736 - DNA, 20 bp, Homo sapiens
aaaaaaaaaaaaaaacaggc

SEQ ID NO: 7737 - DNA, 20 bp, Homo sapiens
aaaaaaaaaaaaaacaggct

SEQ ID NO: 7738 - DNA, 20 bp, Homo sapiens
aaaaaacaggctgggagcag

SEQ ID NO: 7739 - DNA, 20 bp, Homo sapiens
tcccaaagcgctgggattac

SEQ ID NO: 7740 - DNA, 20 bp, Homo sapiens
ccttggcctcccaaagcgct

SEQ ID NO: 7741 - DNA, 20 bp, Homo sapiens
tgcctgtaatcccagcgctt

SEQ ID NO: 7742 - DNA, 20 bp, Homo sapiens
gccttggcctcccaaagcgc

SEQ ID NO: 7743 - DNA, 20 bp, Homo sapiens
gcctgtaatcccagcgcttt

SEQ ID NO: 7744 - DNA, 20 bp, Homo sapiens
tgtaatcccagcgctttggg

SEQ ID NO: 7745 - DNA, 20 bp, Homo sapiens
cccagcgctttgggaggcca

SEQ ID NO: 7746 - DNA, 20 bp, Homo sapiens
agcgctttgggaggccaagg

SEQ ID NO: 7747 - DNA, 20 bp, Homo sapiens
ctcaagtgatccatccgcct

SEQ ID NO: 7748 - DNA, 20 bp, Homo sapiens
ctttgggaggccaaggcgga

SEQ ID NO: 7749 - DNA, 20 bp, Homo sapiens
caaggcggatggatcacttg

SEQ ID NO: 7750 - DNA, 20 bp, Homo sapiens
cggatggatcacttgaggtc

SEQ ID NO: 7751 - DNA, 20 bp, Homo sapiens
gaggtcaggagttcgagacc

SEQ ID NO: 7752 - DNA, 20 bp, Homo sapiens
tcaggagttcgagaccaggc

SEQ ID NO: 7753 - DNA, 20 bp, Homo sapiens
caggagttcgagaccaggct

SEQ ID NO: 7754 - DNA, 20 bp, Homo sapiens
aggagttcgagaccaggctg

SEQ ID NO: 7755 - DNA, 20 bp, Homo sapiens
tttcaccatgttccccagcc

SEQ ID NO: 7756 - DNA, 20 bp, Homo sapiens
cgagaccaggctggggaaca

SEQ ID NO: 7757 - DNA, 20 bp, Homo sapiens
ttgtatttttagtagagacg

SEQ ID NO: 7758 - DNA, 20 bp, Homo sapiens
tttgtatttttagtagagac

SEQ ID NO: 7759 - DNA, 20 bp, Homo sapiens
ttttgtatttttagtagaga

SEQ ID NO: 7760 - DNA, 20 bp, Homo sapiens
ctaaaaatacaaaaattagc

SEQ ID NO: 7761 - DNA, 20 bp, Homo sapiens
taaaaatacaaaaattagcc

SEQ ID NO: 7762 - DNA, 20 bp, Homo sapiens
atacaaaaattagccgggca

SEQ ID NO: 7763 - DNA, 20 bp, Homo sapiens
caggcacccaccaccgtgcc

SEQ ID NO: 7764 - DNA, 20 bp, Homo sapiens
caaaaattagccgggcacgg

SEQ ID NO: 7765 - DNA, 20 bp, Homo sapiens
aaattagccgggcacggtgg

SEQ ID NO: 7766 - DNA, 20 bp, Homo sapiens
aattagccgggcacggtggt

SEQ ID NO: 7767 - DNA, 20 bp, Homo sapiens
tcccaagtagctgggattac

SEQ ID NO: 7768 - DNA, 20 bp, Homo sapiens
cttcagcctcccaagtagct

SEQ ID NO: 7769 - DNA, 20 bp, Homo sapiens
tgcctgtaatcccagctact

SEQ ID NO: 7770 - DNA, 20 bp, Homo sapiens
gcttcagcctcccaagtagc

SEQ ID NO: 7771 - DNA, 20 bp, Homo sapiens
gcctgtaatcccagctactt

SEQ ID NO: 7772 - DNA, 20 bp, Homo sapiens
tgtaatcccagctacttggg

SEQ ID NO: 7773 - DNA, 20 bp, Homo sapiens
gctacttgggaggctgaagc

SEQ ID NO: 7774 - DNA, 20 bp, Homo sapiens
ggagaatcgcttgaacccaa

SEQ ID NO: 7775 - DNA, 20 bp, Homo sapiens
gagaatcgcttgaacccaac

SEQ ID NO: 7776 - DNA, 20 bp, Homo sapiens
aatcgcttgaacccaacggg

SEQ ID NO: 7777 - DNA, 20 bp, Homo sapiens
cactgcaacctccacccgtt

SEQ ID NO: 7778 - DNA, 20 bp, Homo sapiens
tcactgcaacctccacccgt

SEQ ID NO: 7779 - DNA, 20 bp, Homo sapiens
cgcttgaacccaacgggtgg

SEQ ID NO: 7780 - DNA, 20 bp, Homo sapiens
gaggttgcagtgagccaaga

SEQ ID NO: 7781 - DNA, 20 bp, Homo sapiens
agagtgcactggtgccatct

SEQ ID NO: 7782 - DNA, 20 bp, Homo sapiens
gtcgccaggctagagtgcac

SEQ ID NO: 7783 - DNA, 20 bp, Homo sapiens
ggcaccagtgcactctagcc

SEQ ID NO: 7784 - DNA, 20 bp, Homo sapiens
cggagtctcactctgtcgcc

SEQ ID NO: 7785 - DNA, 20 bp, Homo sapiens
ttatttatttatttttgaga

SEQ ID NO: 7786 - DNA, 20 bp, Homo sapiens
aagcagacagactttttagt

SEQ ID NO: 7787 - DNA, 20 bp, Homo sapiens
cggggtgccttgtctgtaga

SEQ ID NO: 7788 - DNA, 20 bp, Homo sapiens
tcggggtgccttgtctgtag

SEQ ID NO: 7789 - DNA, 20 bp, Homo sapiens
ttagacaccctctacagaca

SEQ ID NO: 7790 - DNA, 20 bp, Homo sapiens
accctgggtgcaagcaatcg

SEQ ID NO: 7791 - DNA, 20 bp, Homo sapiens
caccctgggtgcaagcaatc

SEQ ID NO: 7792 - DNA, 20 bp, Homo sapiens
ccaccctgggtgcaagcaat

SEQ ID NO: 7793 - DNA, 20 bp, Homo sapiens
caccccgattgcttgcaccc

SEQ ID NO: 7794 - DNA, 20 bp, Homo sapiens
accccgattgcttgcaccca

SEQ ID NO: 7795 - DNA, 20 bp, Homo sapiens
ccgattgcttgcacccaggg

SEQ ID NO: 7796 - DNA, 20 bp, Homo sapiens
tggagggagtagtccaccct

SEQ ID NO: 7797 - DNA, 20 bp, Homo sapiens
gtggagggagtagtccaccc

SEQ ID NO: 7798 - DNA, 20 bp, Homo sapiens
tgtaacaagggcagggtgga

SEQ ID NO: 7799 - DNA, 20 bp, Homo sapiens
gtgtaacaagggcagggtgg

SEQ ID NO: 7800 - DNA, 20 bp, Homo sapiens
agggtgtaacaagggcaggg

SEQ ID NO: 7801 - DNA, 20 bp, Homo sapiens
gccagggtgtaacaagggca

SEQ ID NO: 7802 - DNA, 20 bp, Homo sapiens
agccagggtgtaacaagggc

SEQ ID NO: 7803 - DNA, 20 bp, Homo sapiens
ccccagccagggtgtaacaa

SEQ ID NO: 7804 - DNA, 20 bp, Homo sapiens
cccccagccagggtgtaaca

SEQ ID NO: 7805 - DNA, 20 bp, Homo sapiens
accctgcccttgttacaccc

SEQ ID NO: 7806 - DNA, 20 bp, Homo sapiens
tgcccttgttacaccctggc

SEQ ID NO: 7807 - DNA, 20 bp, Homo sapiens
gcccttgttacaccctggct

SEQ ID NO: 7808 - DNA, 20 bp, Homo sapiens
cccttgttacaccctggctg

SEQ ID NO: 7809 - DNA, 20 bp, Homo sapiens
gaaatgctgacccccagcca

SEQ ID NO: 7810 - DNA, 20 bp, Homo sapiens
ccttgttacaccctggctgg

SEQ ID NO: 7811 - DNA, 20 bp, Homo sapiens
tgaaatgctgacccccagcc

SEQ ID NO: 7812 - DNA, 20 bp, Homo sapiens
tggctgggggtcagcatttc

SEQ ID NO: 7813 - DNA, 20 bp, Homo sapiens
ggcagctgaatgacccaaag

SEQ ID NO: 7814 - DNA, 20 bp, Homo sapiens
gcagctgaatgacccaaagt

SEQ ID NO: 7815 - DNA, 20 bp, Homo sapiens
cactagcgtgttcccacttt

SEQ ID NO: 7816 - DNA, 20 bp, Homo sapiens
ccactagcgtgttcccactt

SEQ ID NO: 7817 - DNA, 20 bp, Homo sapiens
ccaaagtgggaacacgctag

SEQ ID NO: 7818 - DNA, 20 bp, Homo sapiens
caaagtgggaacacgctagt

SEQ ID NO: 7819 - DNA, 20 bp, Homo sapiens
ggaacacgctagtgggtttg

SEQ ID NO: 7820 - DNA, 20 bp, Homo sapiens
tgggtttgaggatgagcaag

SEQ ID NO: 7821 - DNA, 20 bp, Homo sapiens
gtttgaggatgagcaagtgg

SEQ ID NO: 7822 - DNA, 20 bp, Homo sapiens
tgaggatgagcaagtggagg

SEQ ID NO: 7823 - DNA, 20 bp, Homo sapiens
gaggatgagcaagtggagga

SEQ ID NO: 7824 - DNA, 20 bp, Homo sapiens
agcaagtggaggagggcaat

SEQ ID NO: 7825 - DNA, 20 bp, Homo sapiens
aagtggaggagggcaatagg

SEQ ID NO: 7826 - DNA, 20 bp, Homo sapiens
aataggaggtgacgcccgag

SEQ ID NO: 7827 - DNA, 20 bp, Homo sapiens
ccactctcacctgacctctc

SEQ ID NO: 7828 - DNA, 20 bp, Homo sapiens
tccactctcacctgacctct

SEQ ID NO: 7829 - DNA, 20 bp, Homo sapiens
gaggtgacgcccgagaggtc

SEQ ID NO: 7830 - DNA, 20 bp, Homo sapiens
cccgagaggtcaggtgagag

SEQ ID NO: 7831 - DNA, 20 bp, Homo sapiens
caggtgagagtggatcctgc

SEQ ID NO: 7832 - DNA, 20 bp, Homo sapiens
aggtgagagtggatcctgca

SEQ ID NO: 7833 - DNA, 20 bp, Homo sapiens
ggttcttgccacgaccctgc

SEQ ID NO: 7834 - DNA, 20 bp, Homo sapiens
gagtggatcctgcagggtcg

SEQ ID NO: 7835 - DNA, 20 bp, Homo sapiens
gcagggtcgtggcaagaacc

SEQ ID NO: 7836 - DNA, 20 bp, Homo sapiens
gtcactcaaagtcaaggtcc

SEQ ID NO: 7837 - DNA, 20 bp, Homo sapiens
tcccatgtcactcaaagtca

SEQ ID NO: 7838 - DNA, 20 bp, Homo sapiens
gaccttgactttgagtgaca

SEQ ID NO: 7839 - DNA, 20 bp, Homo sapiens
accttgactttgagtgacat

SEQ ID NO: 7840 - DNA, 20 bp, Homo sapiens
ttgagtgacatgggagccgc

SEQ ID NO: 7841 - DNA, 20 bp, Homo sapiens
agtgacatgggagccgctgg

SEQ ID NO: 7842 - DNA, 20 bp, Homo sapiens
ctctgctcagaagcctccag

SEQ ID NO: 7843 - DNA, 20 bp, Homo sapiens
cgctggaggcttctgagcag

SEQ ID NO: 7844 - DNA, 20 bp, Homo sapiens
tgtcactctgtcgctgaagc

SEQ ID NO: 7845 - DNA, 20 bp, Homo sapiens
tcgctgaagctggagtgcag

SEQ ID NO: 7846 - DNA, 20 bp, Homo sapiens
cactggaacctgggaggcgg

SEQ ID NO: 7847 - DNA, 20 bp, Homo sapiens
cactatagcctccgcctccc

SEQ ID NO: 7848 - DNA, 20 bp, Homo sapiens
attcactggaacctgggagg

SEQ ID NO: 7849 - DNA, 20 bp, Homo sapiens
gagattcactggaacctggg

SEQ ID NO: 7850 - DNA, 20 bp, Homo sapiens
caggagattcactggaacct

SEQ ID NO: 7851 - DNA, 20 bp, Homo sapiens
gcaggagattcactggaacc

SEQ ID NO: 7852 - DNA, 20 bp, Homo sapiens
ggctgatgcaggagattcac

SEQ ID NO: 7853 - DNA, 20 bp, Homo sapiens
tctacctgggaggctgatgc

SEQ ID NO: 7854 - DNA, 20 bp, Homo sapiens
atctcctgcatcagcctccc

SEQ ID NO: 7855 - DNA, 20 bp, Homo sapiens
tgtaatcctatctacctggg

SEQ ID NO: 7856 - DNA, 20 bp, Homo sapiens
gcttgtaatcctatctacct

SEQ ID NO: 7857 - DNA, 20 bp, Homo sapiens
tgcttgtaatcctatctacc

SEQ ID NO: 7858 - DNA, 20 bp, Homo sapiens
catcagcctcccaggtagat

SEQ ID NO: 7859 - DNA, 20 bp, Homo sapiens
caagcaagcatcaccacgcc

SEQ ID NO: 7860 - DNA, 20 bp, Homo sapiens
atacaaaaattagccaggcg

SEQ ID NO: 7861 - DNA, 20 bp, Homo sapiens
taaaaatacaaaaattagcc

SEQ ID NO: 7862 - DNA, 20 bp, Homo sapiens
tttgtatttttagtagagac

SEQ ID NO: 7863 - DNA, 20 bp, Homo sapiens
ttgtatttttagtagagaca

SEQ ID NO: 7864 - DNA, 20 bp, Homo sapiens
gagacagggttttgccatgt

SEQ ID NO: 7865 - DNA, 20 bp, Homo sapiens
cgataccagcctggccaaca

SEQ ID NO: 7866 - DNA, 20 bp, Homo sapiens
agggttttgccatgttggcc

SEQ ID NO: 7867 - DNA, 20 bp, Homo sapiens
ttttgccatgttggccaggc

SEQ ID NO: 7868 - DNA, 20 bp, Homo sapiens
tcaggagttcgataccagcc

SEQ ID NO: 7869 - DNA, 20 bp, Homo sapiens
ggtatcgaactcctgacctc

SEQ ID NO: 7870 - DNA, 20 bp, Homo sapiens
tgggtggatcacctgaggtc

SEQ ID NO: 7871 - DNA, 20 bp, Homo sapiens
tgaggtgggtggatcacctg

SEQ ID NO: 7872 - DNA, 20 bp, Homo sapiens
ctttgggaggctgaggtggg

SEQ ID NO: 7873 - DNA, 20 bp, Homo sapiens
gcactttgggaggctgaggt

SEQ ID NO: 7874 - DNA, 20 bp, Homo sapiens
agcactttgggaggctgagg

SEQ ID NO: 7875 - DNA, 20 bp, Homo sapiens
cccagcactttgggaggctg

SEQ ID NO: 7876 - DNA, 20 bp, Homo sapiens
tgtaatcccagcactttggg

SEQ ID NO: 7877 - DNA, 20 bp, Homo sapiens
gcctgtaatcccagcacttt

SEQ ID NO: 7878 - DNA, 20 bp, Homo sapiens
acctcagcctcccaaagtgc

SEQ ID NO: 7879 - DNA, 20 bp, Homo sapiens
tgcctgtaatcccagcactt

SEQ ID NO: 7880 - DNA, 20 bp, Homo sapiens
cctcagcctcccaaagtgct

SEQ ID NO: 7881 - DNA, 20 bp, Homo sapiens
tcccaaagtgctgggattac

SEQ ID NO: 7882 - DNA, 20 bp, Homo sapiens
aataccaaactaaggtcttc

SEQ ID NO: 7883 - DNA, 20 bp, Homo sapiens
atttcctgaagaccttagtt

SEQ ID NO: 7884 - DNA, 20 bp, Homo sapiens
cttcttataataccaaacta

SEQ ID NO: 7885 - DNA, 20 bp, Homo sapiens
gtttggtattataagaagtc

SEQ ID NO: 7886 - DNA, 20 bp, Homo sapiens
cagcggaattttaactctgc

SEQ ID NO: 7887 - DNA, 20 bp, Homo sapiens
tcagcggaattttaactctg

SEQ ID NO: 7888 - DNA, 20 bp, Homo sapiens
cactgattcctacttctcag

SEQ ID NO: 7889 - DNA, 20 bp, Homo sapiens
ttaaaattccgctgagaagt

SEQ ID NO: 7890 - DNA, 20 bp, Homo sapiens
ctgagaagtaggaatcagtg

SEQ ID NO: 7891 - DNA, 20 bp, Homo sapiens
cagtgaggtgcgtgtccatg

SEQ ID NO: 7892 - DNA, 20 bp, Homo sapiens
agtgaggtgcgtgtccatgt

SEQ ID NO: 7893 - DNA, 20 bp, Homo sapiens
aggtgtggcaaaaacccaca

SEQ ID NO: 7894 - DNA, 20 bp, Homo sapiens
gaccaaggttcacttaggtg

SEQ ID NO: 7895 - DNA, 20 bp, Homo sapiens
cttttgaccaaggttcactt

SEQ ID NO: 7896 - DNA, 20 bp, Homo sapiens
tgccacacctaagtgaacct

SEQ ID NO: 7897 - DNA, 20 bp, Homo sapiens
ctcttatatgcttttgacca

SEQ ID NO: 7898 - DNA, 20 bp, Homo sapiens
agcatataagagctactgat

SEQ ID NO: 7899 - DNA, 20 bp, Homo sapiens
tataagagctactgataggc

SEQ ID NO: 7900 - DNA, 20 bp, Homo sapiens
ataagagctactgataggcc

SEQ ID NO: 7901 - DNA, 20 bp, Homo sapiens
agctactgataggccgggtg

SEQ ID NO: 7902 - DNA, 20 bp, Homo sapiens
caggcatgagccaccacacc

SEQ ID NO: 7903 - DNA, 20 bp, Homo sapiens
tactgataggccgggtgtgg

SEQ ID NO: 7904 - DNA, 20 bp, Homo sapiens
tcccaaagtgctgagattac

SEQ ID NO: 7905 - DNA, 20 bp, Homo sapiens
tgcctgtaatctcagcactt

SEQ ID NO: 7906 - DNA, 20 bp, Homo sapiens
gcctgtaatctcagcacttt

SEQ ID NO: 7907 - DNA, 20 bp, Homo sapiens
tgtaatctcagcactttggg

SEQ ID NO: 7908 - DNA, 20 bp, Homo sapiens
gtaatctcagcactttggga

SEQ ID NO: 7909 - DNA, 20 bp, Homo sapiens
tctcagcactttgggaggga

SEQ ID NO: 7910 - DNA, 20 bp, Homo sapiens
gggaaggatctcttgagccc

SEQ ID NO: 7911 - DNA, 20 bp, Homo sapiens
caggctggtcttgaactcct

SEQ ID NO: 7912 - DNA, 20 bp, Homo sapiens
tcaggctggtcttgaactcc

SEQ ID NO: 7913 - DNA, 20 bp, Homo sapiens
tcttgctatgttgctcaggc

SEQ ID NO: 7914 - DNA, 20 bp, Homo sapiens
ggaatcttgctatgttgctc

SEQ ID NO: 7915 - DNA, 20 bp, Homo sapiens
ttttaaattttgtgtaaaga

SEQ ID NO: 7916 - DNA, 20 bp, Homo sapiens
tttacacaaaatttaaaaat

SEQ ID NO: 7917 - DNA, 20 bp, Homo sapiens
acaaaatttaaaaattggcc

SEQ ID NO: 7918 - DNA, 20 bp, Homo sapiens
atttaaaaattggccaggca

SEQ ID NO: 7919 - DNA, 20 bp, Homo sapiens
caggaatgtacaaccatgcc

SEQ ID NO: 7920 - DNA, 20 bp, Homo sapiens
tcctgagtagctgggattac

SEQ ID NO: 7921 - DNA, 20 bp, Homo sapiens
cctcagcctcctgagtagct

SEQ ID NO: 7922 - DNA, 20 bp, Homo sapiens
acctcagcctcctgagtagc

SEQ ID NO: 7923 - DNA, 20 bp, Homo sapiens
tcctgtaatcccagctactc

SEQ ID NO: 7924 - DNA, 20 bp, Homo sapiens
tgtaatcccagctactcagg

SEQ ID NO: 7925 - DNA, 20 bp, Homo sapiens
cccagctactcaggaggctg

SEQ ID NO: 7926 - DNA, 20 bp, Homo sapiens
agctactcaggaggctgagg

SEQ ID NO: 7927 - DNA, 20 bp, Homo sapiens
gctactcaggaggctgaggt

SEQ ID NO: 7928 - DNA, 20 bp, Homo sapiens
actcaggaggctgaggtggg

SEQ ID NO: 7929 - DNA, 20 bp, Homo sapiens
gtgggaggattgcttgagcc

SEQ ID NO: 7930 - DNA, 20 bp, Homo sapiens
tgggaggattgcttgagcct

SEQ ID NO: 7931 - DNA, 20 bp, Homo sapiens
gattgcttgagcctgggagt

SEQ ID NO: 7932 - DNA, 20 bp, Homo sapiens
cactgtagtctccaactccc

SEQ ID NO: 7933 - DNA, 20 bp, Homo sapiens
ttggagactacagtgagctg

SEQ ID NO: 7934 - DNA, 20 bp, Homo sapiens
caagctggagtgcagtggtg

SEQ ID NO: 7935 - DNA, 20 bp, Homo sapiens
ttgctcaagctggagtgcag

SEQ ID NO: 7936 - DNA, 20 bp, Homo sapiens
tcttgctccattgctcaagc

SEQ ID NO: 7937 - DNA, 20 bp, Homo sapiens
ctgcactccagcttgagcaa

SEQ ID NO: 7938 - DNA, 20 bp, Homo sapiens
gtctcaaaaaaaaaaaaaaa

SEQ ID NO: 7939 - DNA, 20 bp, Homo sapiens
aaaaaaaaaaaaaaaaggcc

SEQ ID NO: 7940 - DNA, 20 bp, Homo sapiens
caggcatgagccactgcgcc

SEQ ID NO: 7941 - DNA, 20 bp, Homo sapiens
aaaaaaaaggccaggcgcag

SEQ ID NO: 7942 - DNA, 20 bp, Homo sapiens
tcccaaagtgctgggattac

SEQ ID NO: 7943 - DNA, 20 bp, Homo sapiens
cctcggcctcccaaagtgct

SEQ ID NO: 7944 - DNA, 20 bp, Homo sapiens
tgcctgtaatcccagcactt

SEQ ID NO: 7945 - DNA, 20 bp, Homo sapiens
gcctcggcctcccaaagtgc

SEQ ID NO: 7946 - DNA, 20 bp, Homo sapiens
gcctgtaatcccagcacttt

SEQ ID NO: 7947 - DNA, 20 bp, Homo sapiens
tgtaatcccagcactttggg

SEQ ID NO: 7948 - DNA, 20 bp, Homo sapiens
cccagcactttgggaggccg

SEQ ID NO: 7949 - DNA, 20 bp, Homo sapiens
agcactttgggaggccgagg

SEQ ID NO: 7950 - DNA, 20 bp, Homo sapiens
gcactttgggaggccgaggc

SEQ ID NO: 7951 - DNA, 20 bp, Homo sapiens
ctcaggcgatccacccgcct

SEQ ID NO: 7952 - DNA, 20 bp, Homo sapiens
ctttgggaggccgaggcggg

SEQ ID NO: 7953 - DNA, 20 bp, Homo sapiens
cgaggcgggtggatcgcctg

SEQ ID NO: 7954 - DNA, 20 bp, Homo sapiens
cgggtggatcgcctgaggtc

SEQ ID NO: 7955 - DNA, 20 bp, Homo sapiens
ggtctcaaactcctgacctc

SEQ ID NO: 7956 - DNA, 20 bp, Homo sapiens
tcaggagtttgagaccagcc

SEQ ID NO: 7957 - DNA, 20 bp, Homo sapiens
tttcaccgtgtttgccaggc

SEQ ID NO: 7958 - DNA, 20 bp, Homo sapiens
ggggtttcaccgtgtttgcc

SEQ ID NO: 7959 - DNA, 20 bp, Homo sapiens
tgagaccagcctggcaaaca

SEQ ID NO: 7960 - DNA, 20 bp, Homo sapiens
ttgtatttttagtagagatg

SEQ ID NO: 7961 - DNA, 20 bp, Homo sapiens
tttgtatttttagtagagat

SEQ ID NO: 7962 - DNA, 20 bp, Homo sapiens
ttttgtatttttagtagaga

SEQ ID NO: 7963 - DNA, 20 bp, Homo sapiens
caggcatgcgccactacgct

SEQ ID NO: 7964 - DNA, 20 bp, Homo sapiens
acaaaattagcccagcgtag

SEQ ID NO: 7965 - DNA, 20 bp, Homo sapiens
acaggcatgcgccactacgc

SEQ ID NO: 7966 - DNA, 20 bp, Homo sapiens
tccctagtagctgggattac

SEQ ID NO: 7967 - DNA, 20 bp, Homo sapiens
cctcagcttccctagtagct

SEQ ID NO: 7968 - DNA, 20 bp, Homo sapiens
tgcctgtaatcccagctact

SEQ ID NO: 7969 - DNA, 20 bp, Homo sapiens
gcctcagcttccctagtagc

SEQ ID NO: 7970 - DNA, 20 bp, Homo sapiens
gcctgtaatcccagctacta

SEQ ID NO: 7971 - DNA, 20 bp, Homo sapiens
cccagctactagggaagctg

SEQ ID NO: 7972 - DNA, 20 bp, Homo sapiens
gctactagggaagctgaggc

SEQ ID NO: 7973 - DNA, 20 bp, Homo sapiens
gcaggagaatcgcgtgaacc

SEQ ID NO: 7974 - DNA, 20 bp, Homo sapiens
caggagaatcgcgtgaacct

SEQ ID NO: 7975 - DNA, 20 bp, Homo sapiens
gagaatcgcgtgaacctggg

SEQ ID NO: 7976 - DNA, 20 bp, Homo sapiens
cactggaacatttgcctccc

SEQ ID NO: 7977 - DNA, 20 bp, Homo sapiens
atggcacgatctcggctcac

SEQ ID NO: 7978 - DNA, 20 bp, Homo sapiens
ggagtgcaatggcacgatct

SEQ ID NO: 7979 - DNA, 20 bp, Homo sapiens
ctgcccaggctggagtgcaa

SEQ ID NO: 7980 - DNA, 20 bp, Homo sapiens
cgtgccattgcactccagcc

SEQ ID NO: 7981 - DNA, 20 bp, Homo sapiens
gtgccattgcactccagcct

SEQ ID NO: 7982 - DNA, 20 bp, Homo sapiens
ccagcaggctctgcccaggc

SEQ ID NO: 7983 - DNA, 20 bp, Homo sapiens
caacccagcaggctctgccc

SEQ ID NO: 7984 - DNA, 20 bp, Homo sapiens
ccagcctgggcagagcctgc

SEQ ID NO: 7985 - DNA, 20 bp, Homo sapiens
cagcctgggcagagcctgct

SEQ ID NO: 7986 - DNA, 20 bp, Homo sapiens
cttacccagcccaacccagc

SEQ ID NO: 7987 - DNA, 20 bp, Homo sapiens
ctgggcagagcctgctgggt

SEQ ID NO: 7988 - DNA, 20 bp, Homo sapiens
tgggcagagcctgctgggtt

SEQ ID NO: 7989 - DNA, 20 bp, Homo sapiens
cagagcctgctgggttgggc

SEQ ID NO: 7990 - DNA, 20 bp, Homo sapiens
agagcctgctgggttgggct

SEQ ID NO: 7991 - DNA, 20 bp, Homo sapiens
agctctgaacaccagtctca

SEQ ID NO: 7992 - DNA, 20 bp, Homo sapiens
gtgacttgaagccatgagac

SEQ ID NO: 7993 - DNA, 20 bp, Homo sapiens
agttcagagcttcacttagg

SEQ ID NO: 7994 - DNA, 20 bp, Homo sapiens
gaaagttcagagcttcactt

SEQ ID NO: 7995 - DNA, 20 bp, Homo sapiens
gaagctctgaactttctcca

SEQ ID NO: 7996 - DNA, 20 bp, Homo sapiens
gggcaagccctgatagtcct

SEQ ID NO: 7997 - DNA, 20 bp, Homo sapiens
aactttctccaaggactatc

SEQ ID NO: 7998 - DNA, 20 bp, Homo sapiens
actttctccaaggactatca

SEQ ID NO: 7999 - DNA, 20 bp, Homo sapiens
aggactatcagggcttgccc

SEQ ID NO: 8000 - DNA, 20 bp, Homo sapiens
ggactatcagggcttgcccc

SEQ ID NO: 8001 - DNA, 20 bp, Homo sapiens
gtgtcggcatcctctgcccg

SEQ ID NO: 8002 - DNA, 20 bp, Homo sapiens
tcagggcttgccccgggcag

SEQ ID NO: 8003 - DNA, 20 bp, Homo sapiens
agtgtcggcatcctctgccc

SEQ ID NO: 8004 - DNA, 20 bp, Homo sapiens
gagtgtcggcatcctctgcc

SEQ ID NO: 8005 - DNA, 20 bp, Homo sapiens
ccagtaagagcagtgagtgt

SEQ ID NO: 8006 - DNA, 20 bp, Homo sapiens
ccgacactcactgctcttac

SEQ ID NO: 8007 - DNA, 20 bp, Homo sapiens
cgacactcactgctcttact

SEQ ID NO: 8008 - DNA, 20 bp, Homo sapiens
agatgtgcatcatgttcatg

SEQ ID NO: 8009 - DNA, 20 bp, Homo sapiens
tacgtgttcgcagcctattt

SEQ ID NO: 8010 - DNA, 20 bp, Homo sapiens
acgtgttcgcagcctatttt

SEQ ID NO: 8011 - DNA, 20 bp, Homo sapiens
ggccacagacagcccaaaat

SEQ ID NO: 8012 - DNA, 20 bp, Homo sapiens
agcctattttgggctgtctg

SEQ ID NO: 8013 - DNA, 20 bp, Homo sapiens
attttgggctgtctgtggcc

SEQ ID NO: 8014 - DNA, 20 bp, Homo sapiens
tagaggctttggcaggcacc

SEQ ID NO: 8015 - DNA, 20 bp, Homo sapiens
cctcgggtagaggctttggc

SEQ ID NO: 8016 - DNA, 20 bp, Homo sapiens
gttccctcgggtagaggctt

SEQ ID NO: 8017 - DNA, 20 bp, Homo sapiens
tcctccgttccctcgggtag

SEQ ID NO: 8018 - DNA, 20 bp, Homo sapiens
cctgccaaagcctctacccg

SEQ ID NO: 8019 - DNA, 20 bp, Homo sapiens
ctgccaaagcctctacccga

SEQ ID NO: 8020 - DNA, 20 bp, Homo sapiens
tctttatcctccgttccctc

SEQ ID NO: 8021 - DNA, 20 bp, Homo sapiens
aaagcctctacccgagggaa

SEQ ID NO: 8022 - DNA, 20 bp, Homo sapiens
atctttatcctccgttccct

SEQ ID NO: 8023 - DNA, 20 bp, Homo sapiens
gcctctacccgagggaacgg

SEQ ID NO: 8024 - DNA, 20 bp, Homo sapiens
cccagcatggcagacaaact

SEQ ID NO: 8025 - DNA, 20 bp, Homo sapiens
acccagcatggcagacaaac

SEQ ID NO: 8026 - DNA, 20 bp, Homo sapiens
acccagtttgtctgccatgc

SEQ ID NO: 8027 - DNA, 20 bp, Homo sapiens
cccagtttgtctgccatgct

SEQ ID NO: 8028 - DNA, 20 bp, Homo sapiens
caccttgtccttacccagca

SEQ ID NO: 8029 - DNA, 20 bp, Homo sapiens
tttgtctgccatgctgggta

SEQ ID NO: 8030 - DNA, 20 bp, Homo sapiens
tgccatgctgggtaaggaca

SEQ ID NO: 8031 - DNA, 20 bp, Homo sapiens
catgctgggtaaggacaagg

SEQ ID NO: 8032 - DNA, 20 bp, Homo sapiens
atgctgggtaaggacaaggt

SEQ ID NO: 8033 - DNA, 20 bp, Homo sapiens
tgctgggtaaggacaaggtg

SEQ ID NO: 8034 - DNA, 20 bp, Homo sapiens
taaggacaaggtggggtgag

SEQ ID NO: 8035 - DNA, 20 bp, Homo sapiens
ggggtgagtggtctcctact

SEQ ID NO: 8036 - DNA, 20 bp, Homo sapiens
gggtgagtggtctcctactt

SEQ ID NO: 8037 - DNA, 20 bp, Homo sapiens
ccattctgctcagcccaagt

SEQ ID NO: 8038 - DNA, 20 bp, Homo sapiens
cctacttgggctgagcagaa

SEQ ID NO: 8039 - DNA, 20 bp, Homo sapiens
tgagcagaatggctcagaaa

SEQ ID NO: 8040 - DNA, 20 bp, Homo sapiens
gaatggctcagaaaaggctc

SEQ ID NO: 8041 - DNA, 20 bp, Homo sapiens
caggggaacttggtaaagga

SEQ ID NO: 8042 - DNA, 20 bp, Homo sapiens
ccaggggaacttggtaaagg

SEQ ID NO: 8043 - DNA, 20 bp, Homo sapiens
cacccaggggaacttggtaa

SEQ ID NO: 8044 - DNA, 20 bp, Homo sapiens
ttcagacacccaggggaact

SEQ ID NO: 8045 - DNA, 20 bp, Homo sapiens
cctcctttaccaagttcccc

SEQ ID NO: 8046 - DNA, 20 bp, Homo sapiens
ctcctttaccaagttcccct

SEQ ID NO: 8047 - DNA, 20 bp, Homo sapiens
gaagggcttcagacacccag

SEQ ID NO: 8048 - DNA, 20 bp, Homo sapiens
ggaagggcttcagacaccca

SEQ ID NO: 8049 - DNA, 20 bp, Homo sapiens
tggaagggcttcagacaccc

SEQ ID NO: 8050 - DNA, 20 bp, Homo sapiens
agaaatgaatcatgatggaa

SEQ ID NO: 8051 - DNA, 20 bp, Homo sapiens
aagaaatgaatcatgatgga

SEQ ID NO: 8052 - DNA, 20 bp, Homo sapiens
ctcaaagaaatgaatcatga

SEQ ID NO: 8053 - DNA, 20 bp, Homo sapiens
ctgtgaagtgcttaattcaa

SEQ ID NO: 8054 - DNA, 20 bp, Homo sapiens
aattaagcacttcacagagc

SEQ ID NO: 8055 - DNA, 20 bp, Homo sapiens
gcacttcacagagcaggttc

SEQ ID NO: 8056 - DNA, 20 bp, Homo sapiens
cttcacagagcaggttcagg

SEQ ID NO: 8057 - DNA, 20 bp, Homo sapiens
cagagcaggttcaggaggcc

SEQ ID NO: 8058 - DNA, 20 bp, Homo sapiens
agagcaggttcaggaggcct

SEQ ID NO: 8059 - DNA, 20 bp, Homo sapiens
gagcaggttcaggaggcctg

SEQ ID NO: 8060 - DNA, 20 bp, Homo sapiens
ggttgaaatctgcatacccc

SEQ ID NO: 8061 - DNA, 20 bp, Homo sapiens
tatgcagatttcaaccctct

SEQ ID NO: 8062 - DNA, 20 bp, Homo sapiens
caaggaaacaaaggccaaga

SEQ ID NO: 8063 - DNA, 20 bp, Homo sapiens
acaaggaaacaaaggccaag

SEQ ID NO: 8064 - DNA, 20 bp, Homo sapiens
ttttacagacaaggaaacaa

SEQ ID NO: 8065 - DNA, 20 bp, Homo sapiens
ctaaccacattttacagaca

SEQ ID NO: 8066 - DNA, 20 bp, Homo sapiens
gtttccttgtctgtaaaatg

SEQ ID NO: 8067 - DNA, 20 bp, Homo sapiens
gtctgtaaaatgtggttagc

SEQ ID NO: 8068 - DNA, 20 bp, Homo sapiens
ctggtatcagcttgagagct

SEQ ID NO: 8069 - DNA, 20 bp, Homo sapiens
gtatcagcttgagagctcgg

SEQ ID NO: 8070 - DNA, 20 bp, Homo sapiens
tatcagcttgagagctcgga

SEQ ID NO: 8071 - DNA, 20 bp, Homo sapiens
atcagcttgagagctcggag

SEQ ID NO: 8072 - DNA, 20 bp, Homo sapiens
ttgtcacttagagttagatg

SEQ ID NO: 8073 - DNA, 20 bp, Homo sapiens
cttgtcacttagagttagat

SEQ ID NO: 8074 - DNA, 20 bp, Homo sapiens
ccttgtcacttagagttaga

SEQ ID NO: 8075 - DNA, 20 bp, Homo sapiens
ccatctaactctaagtgaca

SEQ ID NO: 8076 - DNA, 20 bp, Homo sapiens
ggctgagactctccagccct

SEQ ID NO: 8077 - DNA, 20 bp, Homo sapiens
ttggatgagaatcctagggc

SEQ ID NO: 8078 - DNA, 20 bp, Homo sapiens
ggttttggatgagaatccta

SEQ ID NO: 8079 - DNA, 20 bp, Homo sapiens
gggttttggatgagaatcct

SEQ ID NO: 8080 - DNA, 20 bp, Homo sapiens
gtctgagcctcgaggggttt

SEQ ID NO: 8081 - DNA, 20 bp, Homo sapiens
ttctcatccaaaacccctcg

SEQ ID NO: 8082 - DNA, 20 bp, Homo sapiens
ccaaaggtctgagcctcgag

SEQ ID NO: 8083 - DNA, 20 bp, Homo sapiens
tccaaaggtctgagcctcga

SEQ ID NO: 8084 - DNA, 20 bp, Homo sapiens
ctccaaaggtctgagcctcg

SEQ ID NO: 8085 - DNA, 20 bp, Homo sapiens
cccctcgaggctcagacctt

SEQ ID NO: 8086 - DNA, 20 bp, Homo sapiens
gaatcacactcctgctccaa

SEQ ID NO: 8087 - DNA, 20 bp, Homo sapiens
gaggctcagacctttggagc

SEQ ID NO: 8088 - DNA, 20 bp, Homo sapiens
ttggagcaggagtgtgattc

SEQ ID NO: 8089 - DNA, 20 bp, Homo sapiens
tgggggccagagagggtggt

SEQ ID NO: 8090 - DNA, 20 bp, Homo sapiens
cgcctgggggccagagaggg

SEQ ID NO: 8091 - DNA, 20 bp, Homo sapiens
ttctggccaaccaccctctc

SEQ ID NO: 8092 - DNA, 20 bp, Homo sapiens
gggcgcctgggggccagaga

SEQ ID NO: 8093 - DNA, 20 bp, Homo sapiens
agggcgcctgggggccagag

SEQ ID NO: 8094 - DNA, 20 bp, Homo sapiens
aaccaccctctctggccccc

SEQ ID NO: 8095 - DNA, 20 bp, Homo sapiens
cacaagaagagggcgcctgg

SEQ ID NO: 8096 - DNA, 20 bp, Homo sapiens
ccacaagaagagggcgcctg

SEQ ID NO: 8097 - DNA, 20 bp, Homo sapiens
tccacaagaagagggcgcct

SEQ ID NO: 8098 - DNA, 20 bp, Homo sapiens
atccacaagaagagggcgcc

SEQ ID NO: 8099 - DNA, 20 bp, Homo sapiens
ccagaacatccacaagaaga

SEQ ID NO: 8100 - DNA, 20 bp, Homo sapiens
gccagaacatccacaagaag

SEQ ID NO: 8101 - DNA, 20 bp, Homo sapiens
ccccaggcgccctcttcttg

SEQ ID NO: 8102 - DNA, 20 bp, Homo sapiens
ccctcttcttgtggatgttc

SEQ ID NO: 8103 - DNA, 20 bp, Homo sapiens
agcagagcagagttgaaact

SEQ ID NO: 8104 - DNA, 20 bp, Homo sapiens
tgctgagaagtccaatcgaa

SEQ ID NO: 8105 - DNA, 20 bp, Homo sapiens
acggcattcttcctttcgat

SEQ ID NO: 8106 - DNA, 20 bp, Homo sapiens
agcatagtaggtgttgaaca

SEQ ID NO: 8107 - DNA, 20 bp, Homo sapiens
gctgactgctacagcatagt

SEQ ID NO: 8108 - DNA, 20 bp, Homo sapiens
ctatgctgtagcagtcagcg

SEQ ID NO: 8109 - DNA, 20 bp, Homo sapiens
agcgtggtgacagccatctc

SEQ ID NO: 8110 - DNA, 20 bp, Homo sapiens
gcgtggtgacagccatctca

SEQ ID NO: 8111 - DNA, 20 bp, Homo sapiens
agccaaggatgaccctgaga

SEQ ID NO: 8112 - DNA, 20 bp, Homo sapiens
agccatctcagggtcatcct

SEQ ID NO: 8113 - DNA, 20 bp, Homo sapiens
cttcccttgggggtgagcca

SEQ ID NO: 8114 - DNA, 20 bp, Homo sapiens
tcatccttggctcaccccca

SEQ ID NO: 8115 - DNA, 20 bp, Homo sapiens
catccttggctcacccccaa

SEQ ID NO: 8116 - DNA, 20 bp, Homo sapiens
ccttgctgatcttcccttgg

SEQ ID NO: 8117 - DNA, 20 bp, Homo sapiens
accttgctgatcttcccttg

SEQ ID NO: 8118 - DNA, 20 bp, Homo sapiens
caccttgctgatcttccctt

SEQ ID NO: 8119 - DNA, 20 bp, Homo sapiens
tcaccttgctgatcttccct

SEQ ID NO: 8120 - DNA, 20 bp, Homo sapiens
cccccaagggaagatcagca

SEQ ID NO: 8121 - DNA, 20 bp, Homo sapiens
ggaagatcagcaaggtgagc

SEQ ID NO: 8122 - DNA, 20 bp, Homo sapiens
gaagatcagcaaggtgagca

SEQ ID NO: 8123 - DNA, 20 bp, Homo sapiens
ggtgagcagggcgctgccct

SEQ ID NO: 8124 - DNA, 20 bp, Homo sapiens
gtgagcagggcgctgccctt

SEQ ID NO: 8125 - DNA, 20 bp, Homo sapiens
tagacccaagtgctgcccaa

SEQ ID NO: 8126 - DNA, 20 bp, Homo sapiens
ttagacccaagtgctgccca

SEQ ID NO: 8127 - DNA, 20 bp, Homo sapiens
cgctgcccttgggcagcact

SEQ ID NO: 8128 - DNA, 20 bp, Homo sapiens
gctgcccttgggcagcactt

SEQ ID NO: 8129 - DNA, 20 bp, Homo sapiens
gggcagcacttgggtctaac

SEQ ID NO: 8130 - DNA, 20 bp, Homo sapiens
gctggccctggggtggggag

SEQ ID NO: 8131 - DNA, 20 bp, Homo sapiens
cgctggccctggggtgggga

SEQ ID NO: 8132 - DNA, 20 bp, Homo sapiens
acgctggccctggggtgggg

SEQ ID NO: 8133 - DNA, 20 bp, Homo sapiens
tttatgcccctccccacccc

SEQ ID NO: 8134 - DNA, 20 bp, Homo sapiens
cccacgctggccctggggtg

SEQ ID NO: 8135 - DNA, 20 bp, Homo sapiens
ttatgcccctccccacccca

SEQ ID NO: 8136 - DNA, 20 bp, Homo sapiens
acccacgctggccctggggt

SEQ ID NO: 8137 - DNA, 20 bp, Homo sapiens
aacccacgctggccctgggg

SEQ ID NO: 8138 - DNA, 20 bp, Homo sapiens
cccaacccacgctggccctg

SEQ ID NO: 8139 - DNA, 20 bp, Homo sapiens
tcccaacccacgctggccct

SEQ ID NO: 8140 - DNA, 20 bp, Homo sapiens
ctcccaacccacgctggccc

SEQ ID NO: 8141 - DNA, 20 bp, Homo sapiens
tccccaccccagggccagcg

SEQ ID NO: 8142 - DNA, 20 bp, Homo sapiens
ccccaccccagggccagcgt

SEQ ID NO: 8143 - DNA, 20 bp, Homo sapiens
tgccctctcccaacccacgc

SEQ ID NO: 8144 - DNA, 20 bp, Homo sapiens
accccagggccagcgtgggt

SEQ ID NO: 8145 - DNA, 20 bp, Homo sapiens
ccccagggccagcgtgggtt

SEQ ID NO: 8146 - DNA, 20 bp, Homo sapiens
gggccagcgtgggttgggag

SEQ ID NO: 8147 - DNA, 20 bp, Homo sapiens
ggccagcgtgggttgggaga

SEQ ID NO: 8148 - DNA, 20 bp, Homo sapiens
tgggttgggagagggcatgc

SEQ ID NO: 8149 - DNA, 20 bp, Homo sapiens
gggttgggagagggcatgcc

SEQ ID NO: 8150 - DNA, 20 bp, Homo sapiens
ttgggagagggcatgccggg

SEQ ID NO: 8151 - DNA, 20 bp, Homo sapiens
ggagagggcatgccgggtgg

SEQ ID NO: 8152 - DNA, 20 bp, Homo sapiens
gcaggcacagctccaccacc

SEQ ID NO: 8153 - DNA, 20 bp, Homo sapiens
tagagctccactgtagaggc

SEQ ID NO: 8154 - DNA, 20 bp, Homo sapiens
agctgtgcctgcctctacag

SEQ ID NO: 8155 - DNA, 20 bp, Homo sapiens
tacctagagctccactgtag

SEQ ID NO: 8156 - DNA, 20 bp, Homo sapiens
tgcctctacagtggagctct

SEQ ID NO: 8157 - DNA, 20 bp, Homo sapiens
tggagctctaggtagaatgc

SEQ ID NO: 8158 - DNA, 20 bp, Homo sapiens
ggagctctaggtagaatgct

SEQ ID NO: 8159 - DNA, 20 bp, Homo sapiens
gctctaggtagaatgctggg

SEQ ID NO: 8160 - DNA, 20 bp, Homo sapiens
agaatgctgggtggtcacag

SEQ ID NO: 8161 - DNA, 20 bp, Homo sapiens
gaatgctgggtggtcacagt

SEQ ID NO: 8162 - DNA, 20 bp, Homo sapiens
ctgggtggtcacagtgggcc

SEQ ID NO: 8163 - DNA, 20 bp, Homo sapiens
tgggtggtcacagtgggcct

SEQ ID NO: 8164 - DNA, 20 bp, Homo sapiens
tggacagtctcctgagtccc

SEQ ID NO: 8165 - DNA, 20 bp, Homo sapiens
tcacagtgggcctgggactc

SEQ ID NO: 8166 - DNA, 20 bp, Homo sapiens
cccagaaagcctttgatcac

SEQ ID NO: 8167 - DNA, 20 bp, Homo sapiens
ggagactgtccagtgatcaa

SEQ ID NO: 8168 - DNA, 20 bp, Homo sapiens
tccagtgatcaaaggctttc

SEQ ID NO: 8169 - DNA, 20 bp, Homo sapiens
ccagtgatcaaaggctttct

SEQ ID NO: 8170 - DNA, 20 bp, Homo sapiens
cagtgatcaaaggctttctg

SEQ ID NO: 8171 - DNA, 20 bp, Homo sapiens
agtgatcaaaggctttctgg

SEQ ID NO: 8172 - DNA, 20 bp, Homo sapiens
ctgtttcatgttagcatgga

SEQ ID NO: 8173 - DNA, 20 bp, Homo sapiens
aggtctgtttcatgttagca

SEQ ID NO: 8174 - DNA, 20 bp, Homo sapiens
cagaaatggggttcaaactg

SEQ ID NO: 8175 - DNA, 20 bp, Homo sapiens
tttagcaactagcagaaatg

SEQ ID NO: 8176 - DNA, 20 bp, Homo sapiens
ctttagcaactagcagaaat

SEQ ID NO: 8177 - DNA, 20 bp, Homo sapiens
actttagcaactagcagaaa

SEQ ID NO: 8178 - DNA, 20 bp, Homo sapiens
ttgctgctgactctcgctca

SEQ ID NO: 8179 - DNA, 20 bp, Homo sapiens
gttggggggaagagagaggc

SEQ ID NO: 8180 - DNA, 20 bp, Homo sapiens
atttgttggggggaagagag

SEQ ID NO: 8181 - DNA, 20 bp, Homo sapiens
cattcttgaaatttgttggg

SEQ ID NO: 8182 - DNA, 20 bp, Homo sapiens
ccattcttgaaatttgttgg

SEQ ID NO: 8183 - DNA, 20 bp, Homo sapiens
tccattcttgaaatttgttg

SEQ ID NO: 8184 - DNA, 20 bp, Homo sapiens
ttccattcttgaaatttgtt

SEQ ID NO: 8185 - DNA, 20 bp, Homo sapiens
gttccattcttgaaatttgt

SEQ ID NO: 8186 - DNA, 20 bp, Homo sapiens
cccccaacaaatttcaagaa

SEQ ID NO: 8187 - DNA, 20 bp, Homo sapiens
ttctctacttctgattctga

SEQ ID NO: 8188 - DNA, 20 bp, Homo sapiens
agtatgtgacactagccatg

SEQ ID NO: 8189 - DNA, 20 bp, Homo sapiens
gtggcttgaccagagccaca

SEQ ID NO: 8190 - DNA, 20 bp, Homo sapiens
tgacactagccatgtggctc

SEQ ID NO: 8191 - DNA, 20 bp, Homo sapiens
tgagactcaaaacgttgaag

SEQ ID NO: 8192 - DNA, 20 bp, Homo sapiens
ttcaacgttttgagtctcag

SEQ ID NO: 8193 - DNA, 20 bp, Homo sapiens
taattcccactttacagatg

SEQ ID NO: 8194 - DNA, 20 bp, Homo sapiens
cagtggcctcatctgtaaag

SEQ ID NO: 8195 - DNA, 20 bp, Homo sapiens
agtggcctcatctgtaaagt

SEQ ID NO: 8196 - DNA, 20 bp, Homo sapiens
gtaaagtgggaattaagaga

SEQ ID NO: 8197 - DNA, 20 bp, Homo sapiens
ggtgcatgtaaagtgcttaa

SEQ ID NO: 8198 - DNA, 20 bp, Homo sapiens
gtgcatgtaaagtgcttaac

SEQ ID NO: 8199 - DNA, 20 bp, Homo sapiens
tgcatgtaaagtgcttaacg

SEQ ID NO: 8200 - DNA, 20 bp, Homo sapiens
agtgcttaacggggagtaaa

SEQ ID NO: 8201 - DNA, 20 bp, Homo sapiens
cttaacggggagtaaatggt

SEQ ID NO: 8202 - DNA, 20 bp, Homo sapiens
ctattagtaaagagagacga

SEQ ID NO: 8203 - DNA, 20 bp, Homo sapiens
gatggtgtgtgtgagtcttg

SEQ ID NO: 8204 - DNA, 20 bp, Homo sapiens
atggtgtgtgtgagtcttgt

SEQ ID NO: 8205 - DNA, 20 bp, Homo sapiens
gtgagtcttgtgggcagaga

SEQ ID NO: 8206 - DNA, 20 bp, Homo sapiens
tgagtcttgtgggcagagat

SEQ ID NO: 8207 - DNA, 20 bp, Homo sapiens
tgtgggcagagatgggtgag

SEQ ID NO: 8208 - DNA, 20 bp, Homo sapiens
gtgggcagagatgggtgaga

SEQ ID NO: 8209 - DNA, 20 bp, Homo sapiens
tgggcagagatgggtgagag

SEQ ID NO: 8210 - DNA, 20 bp, Homo sapiens
aaaacaagttctcatgatga

SEQ ID NO: 8211 - DNA, 20 bp, Homo sapiens
aaacaagttctcatgatgat

SEQ ID NO: 8212 - DNA, 20 bp, Homo sapiens
aacaagttctcatgatgatg

SEQ ID NO: 8213 - DNA, 20 bp, Homo sapiens
acaagttctcatgatgatgg

SEQ ID NO: 8214 - DNA, 20 bp, Homo sapiens
gttctcatgatgatggggga

SEQ ID NO: 8215 - DNA, 20 bp, Homo sapiens
ttctcatgatgatgggggaa

SEQ ID NO: 8216 - DNA, 20 bp, Homo sapiens
tctcatgatgatgggggaag

SEQ ID NO: 8217 - DNA, 20 bp, Homo sapiens
atgggggaaggggctccagc

SEQ ID NO: 8218 - DNA, 20 bp, Homo sapiens
ggggaaggggctccagctgg

SEQ ID NO: 8219 - DNA, 20 bp, Homo sapiens
ttccctccgacaccaccagc

SEQ ID NO: 8220 - DNA, 20 bp, Homo sapiens
ggggctccagctggtggtgt

SEQ ID NO: 8221 - DNA, 20 bp, Homo sapiens
gctccagctggtggtgtcgg

SEQ ID NO: 8222 - DNA, 20 bp, Homo sapiens
ctccagctggtggtgtcgga

SEQ ID NO: 8223 - DNA, 20 bp, Homo sapiens
ggtggtgtcggagggaagtc

SEQ ID NO: 8224 - DNA, 20 bp, Homo sapiens
gggaagtctggacagaccag

SEQ ID NO: 8225 - DNA, 20 bp, Homo sapiens
aagtctggacagaccagtgg

SEQ ID NO: 8226 - DNA, 20 bp, Homo sapiens
agtctggacagaccagtggt

SEQ ID NO: 8227 - DNA, 20 bp, Homo sapiens
gtctggacagaccagtggtg

SEQ ID NO: 8228 - DNA, 20 bp, Homo sapiens
tcccacccgagccccaccac

SEQ ID NO: 8229 - DNA, 20 bp, Homo sapiens
gacagaccagtggtggggct

SEQ ID NO: 8230 - DNA, 20 bp, Homo sapiens
acagaccagtggtggggctc

SEQ ID NO: 8231 - DNA, 20 bp, Homo sapiens
gaccagtggtggggctcggg

SEQ ID NO: 8232 - DNA, 20 bp, Homo sapiens
accagtggtggggctcgggt

SEQ ID NO: 8233 - DNA, 20 bp, Homo sapiens
agtggtggggctcgggtggg

SEQ ID NO: 8234 - DNA, 20 bp, Homo sapiens
gggctggagtggaaagaatg

SEQ ID NO: 8235 - DNA, 20 bp, Homo sapiens
tgctgtgaagctgtcatctg

SEQ ID NO: 8236 - DNA, 20 bp, Homo sapiens
cagcagaattcagtgctaag

SEQ ID NO: 8237 - DNA, 20 bp, Homo sapiens
cagtgctaagaggaagtgag

SEQ ID NO: 8238 - DNA, 20 bp, Homo sapiens
ttctgtcaccatggaactca

SEQ ID NO: 8239 - DNA, 20 bp, Homo sapiens
gtgagtggccatgagttcca

SEQ ID NO: 8240 - DNA, 20 bp, Homo sapiens
tcttagactttctgtcacca

SEQ ID NO: 8241 - DNA, 20 bp, Homo sapiens
aaagtctaagacacccagca

SEQ ID NO: 8242 - DNA, 20 bp, Homo sapiens
acacccactcctgccttgct

SEQ ID NO: 8243 - DNA, 20 bp, Homo sapiens
gacacccactcctgccttgc

SEQ ID NO: 8244 - DNA, 20 bp, Homo sapiens
tctaagacacccagcaaggc

SEQ ID NO: 8245 - DNA, 20 bp, Homo sapiens
gacacccagcaaggcaggag

SEQ ID NO: 8246 - DNA, 20 bp, Homo sapiens
acacccagcaaggcaggagt

SEQ ID NO: 8247 - DNA, 20 bp, Homo sapiens
gcaggagtgggtgtcaactc

SEQ ID NO: 8248 - DNA, 20 bp, Homo sapiens
caggagtgggtgtcaactca

SEQ ID NO: 8249 - DNA, 20 bp, Homo sapiens
gtcaactcagggaagcccag

SEQ ID NO: 8250 - DNA, 20 bp, Homo sapiens
ctcacctaggattagcctct

SEQ ID NO: 8251 - DNA, 20 bp, Homo sapiens
tctcacctaggattagcctc

SEQ ID NO: 8252 - DNA, 20 bp, Homo sapiens
gaagcccagaggctaatcct

SEQ ID NO: 8253 - DNA, 20 bp, Homo sapiens
gacaccctcagctctcacct

SEQ ID NO: 8254 - DNA, 20 bp, Homo sapiens
ctaatcctaggtgagagctg

SEQ ID NO: 8255 - DNA, 20 bp, Homo sapiens
taatcctaggtgagagctga

SEQ ID NO: 8256 - DNA, 20 bp, Homo sapiens
gagggtgtcagataagagca

SEQ ID NO: 8257 - DNA, 20 bp, Homo sapiens
tgtcagataagagcaaggca

SEQ ID NO: 8258 - DNA, 20 bp, Homo sapiens
ataagagcaaggcaaggctc

SEQ ID NO: 8259 - DNA, 20 bp, Homo sapiens
gcaaggcaaggctccggttc

SEQ ID NO: 8260 - DNA, 20 bp, Homo sapiens
gtccttcactgctccagaac

SEQ ID NO: 8261 - DNA, 20 bp, Homo sapiens
ctccggttctggagcagtga

SEQ ID NO: 8262 - DNA, 20 bp, Homo sapiens
acatagcagagctatgaccc

SEQ ID NO: 8263 - DNA, 20 bp, Homo sapiens
ataagctgggccttgttcct

SEQ ID NO: 8264 - DNA, 20 bp, Homo sapiens
agagctatgacccaggaaca

SEQ ID NO: 8265 - DNA, 20 bp, Homo sapiens
aataagctgggccttgttcc

SEQ ID NO: 8266 - DNA, 20 bp, Homo sapiens
gggcccagtttcaataagct

SEQ ID NO: 8267 - DNA, 20 bp, Homo sapiens
tgggcccagtttcaataagc

SEQ ID NO: 8268 - DNA, 20 bp, Homo sapiens
aaggcccagcttattgaaac

SEQ ID NO: 8269 - DNA, 20 bp, Homo sapiens
aggcccagcttattgaaact

SEQ ID NO: 8270 - DNA, 20 bp, Homo sapiens
ctgtgccaccctgtgtgact

SEQ ID NO: 8271 - DNA, 20 bp, Homo sapiens
cctgtgccaccctgtgtgac

SEQ ID NO: 8272 - DNA, 20 bp, Homo sapiens
gaaactgggcccagtcacac

SEQ ID NO: 8273 - DNA, 20 bp, Homo sapiens
aaactgggcccagtcacaca

SEQ ID NO: 8274 - DNA, 20 bp, Homo sapiens
ctgggcccagtcacacaggg

SEQ ID NO: 8275 - DNA, 20 bp, Homo sapiens
ccagtcacacagggtggcac

SEQ ID NO: 8276 - DNA, 20 bp, Homo sapiens
tattattattattggctact

SEQ ID NO: 8277 - DNA, 20 bp, Homo sapiens
attgtttttattattattat

SEQ ID NO: 8278 - DNA, 20 bp, Homo sapiens
taacaatgatttgtgtctac

SEQ ID NO: 8279 - DNA, 20 bp, Homo sapiens
aacaatgatttgtgtctact

SEQ ID NO: 8280 - DNA, 20 bp, Homo sapiens
tcatgttctatgccagacac

SEQ ID NO: 8281 - DNA, 20 bp, Homo sapiens
catgttctatgccagacact

SEQ ID NO: 8282 - DNA, 20 bp, Homo sapiens
aaagctcttagcccagtgtc

SEQ ID NO: 8283 - DNA, 20 bp, Homo sapiens
tgggctaagagctttatatg

SEQ ID NO: 8284 - DNA, 20 bp, Homo sapiens
ttcttcataaggttattgta

SEQ ID NO: 8285 - DNA, 20 bp, Homo sapiens
ttggatgtaccttcttcata

SEQ ID NO: 8286 - DNA, 20 bp, Homo sapiens
ttacaataaccttatgaaga

SEQ ID NO: 8287 - DNA, 20 bp, Homo sapiens
ggcctagaagaatggggttt

SEQ ID NO: 8288 - DNA, 20 bp, Homo sapiens
gcacctggcctagaagaatg

SEQ ID NO: 8289 - DNA, 20 bp, Homo sapiens
tgcacctggcctagaagaat

SEQ ID NO: 8290 - DNA, 20 bp, Homo sapiens
ctgcacctggcctagaagaa

SEQ ID NO: 8291 - DNA, 20 bp, Homo sapiens
atccaaaaccccattcttct

SEQ ID NO: 8292 - DNA, 20 bp, Homo sapiens
aaaccccattcttctaggcc

SEQ ID NO: 8293 - DNA, 20 bp, Homo sapiens
caggtgtgagccactgcacc

SEQ ID NO: 8294 - DNA, 20 bp, Homo sapiens
ttcttctaggccaggtgcag

SEQ ID NO: 8295 - DNA, 20 bp, Homo sapiens
tcccaaaatattgggattac

SEQ ID NO: 8296 - DNA, 20 bp, Homo sapiens
cctcagcctcccaaaatatt

SEQ ID NO: 8297 - DNA, 20 bp, Homo sapiens
cacctgtaatcccaatattt

SEQ ID NO: 8298 - DNA, 20 bp, Homo sapiens
gcctcagcctcccaaaatat

SEQ ID NO: 8299 - DNA, 20 bp, Homo sapiens
acctgtaatcccaatatttt

SEQ ID NO: 8300 - DNA, 20 bp, Homo sapiens
tgtaatcccaatattttggg

SEQ ID NO: 8301 - DNA, 20 bp, Homo sapiens
cccaatattttgggaggctg

SEQ ID NO: 8302 - DNA, 20 bp, Homo sapiens
ttttgggaggctgaggcaag

SEQ ID NO: 8303 - DNA, 20 bp, Homo sapiens
ggaggctgaggcaagaggat

SEQ ID NO: 8304 - DNA, 20 bp, Homo sapiens
tgaggcaagaggattggttg

SEQ ID NO: 8305 - DNA, 20 bp, Homo sapiens
caagaggattggttgaggcc

SEQ ID NO: 8306 - DNA, 20 bp, Homo sapiens
ctgggctggtcttgaactcc

SEQ ID NO: 8307 - DNA, 20 bp, Homo sapiens
caggagttcaagaccagccc

SEQ ID NO: 8308 - DNA, 20 bp, Homo sapiens
tcttgctatgttgcctgggc

SEQ ID NO: 8309 - DNA, 20 bp, Homo sapiens
agggtcttgctatgttgcct

SEQ ID NO: 8310 - DNA, 20 bp, Homo sapiens
cagggtcttgctatgttgcc

SEQ ID NO: 8311 - DNA, 20 bp, Homo sapiens
tgttttattttttagagaca

SEQ ID NO: 8312 - DNA, 20 bp, Homo sapiens
ttgttttattttttagagac

SEQ ID NO: 8313 - DNA, 20 bp, Homo sapiens
ccctgggcagcgggaagaat

SEQ ID NO: 8314 - DNA, 20 bp, Homo sapiens
tccctgggcagcgggaagaa

SEQ ID NO: 8315 - DNA, 20 bp, Homo sapiens
gtggtgtgtccctgggcagc

SEQ ID NO: 8316 - DNA, 20 bp, Homo sapiens
acccattcttcccgctgccc

SEQ ID NO: 8317 - DNA, 20 bp, Homo sapiens
agtggtgtgtccctgggcag

SEQ ID NO: 8318 - DNA, 20 bp, Homo sapiens
cccattcttcccgctgccca

SEQ ID NO: 8319 - DNA, 20 bp, Homo sapiens
ctcattagtggtgtgtccct

SEQ ID NO: 8320 - DNA, 20 bp, Homo sapiens
actcattagtggtgtgtccc

SEQ ID NO: 8321 - DNA, 20 bp, Homo sapiens
gcacccatcacactcattag

SEQ ID NO: 8322 - DNA, 20 bp, Homo sapiens
cacaccactaatgagtgtga

SEQ ID NO: 8323 - DNA, 20 bp, Homo sapiens
acaccactaatgagtgtgat

SEQ ID NO: 8324 - DNA, 20 bp, Homo sapiens
aatgagtgtgatgggtgcct

SEQ ID NO: 8325 - DNA, 20 bp, Homo sapiens
gtccaggtgctcagcatcct

SEQ ID NO: 8326 - DNA, 20 bp, Homo sapiens
tgcctaggatgctgagcacc

SEQ ID NO: 8327 - DNA, 20 bp, Homo sapiens
gggaatgagctgggaagtcc

SEQ ID NO: 8328 - DNA, 20 bp, Homo sapiens
cagcatttagggaatgagct

SEQ ID NO: 8329 - DNA, 20 bp, Homo sapiens
gcagcatttagggaatgagc

SEQ ID NO: 8330 - DNA, 20 bp, Homo sapiens
ccctgattgtgcagcattta

SEQ ID NO: 8331 - DNA, 20 bp, Homo sapiens
accctgattgtgcagcattt

SEQ ID NO: 8332 - DNA, 20 bp, Homo sapiens
tccctaaatgctgcacaatc

SEQ ID NO: 8333 - DNA, 20 bp, Homo sapiens
ccctaaatgctgcacaatca

SEQ ID NO: 8334 - DNA, 20 bp, Homo sapiens
actactgcctcttaggctca

SEQ ID NO: 8335 - DNA, 20 bp, Homo sapiens
cactactgcctcttaggctc

SEQ ID NO: 8336 - DNA, 20 bp, Homo sapiens
aactgtgccctgagcctaag

SEQ ID NO: 8337 - DNA, 20 bp, Homo sapiens
ccagctcactactgcctctt

SEQ ID NO: 8338 - DNA, 20 bp, Homo sapiens
cctaagaggcagtagtgagc

SEQ ID NO: 8339 - DNA, 20 bp, Homo sapiens
ccttcatcagtggacatgat

SEQ ID NO: 8340 - DNA, 20 bp, Homo sapiens
tccttcatcagtggacatga

SEQ ID NO: 8341 - DNA, 20 bp, Homo sapiens
ggctacgtgtccttcatcag

SEQ ID NO: 8342 - DNA, 20 bp, Homo sapiens
cccatcatgtccactgatga

SEQ ID NO: 8343 - DNA, 20 bp, Homo sapiens
aggacacgtagccccaacac

SEQ ID NO: 8344 - DNA, 20 bp, Homo sapiens
accacttctcccctgtgttg

SEQ ID NO: 8345 - DNA, 20 bp, Homo sapiens
ggacacgtagccccaacaca

SEQ ID NO: 8346 - DNA, 20 bp, Homo sapiens
aaccacttctcccctgtgtt

SEQ ID NO: 8347 - DNA, 20 bp, Homo sapiens
gacacgtagccccaacacag

SEQ ID NO: 8348 - DNA, 20 bp, Homo sapiens
aaaccacttctcccctgtgt

SEQ ID NO: 8349 - DNA, 20 bp, Homo sapiens
gccccaacacaggggagaag

SEQ ID NO: 8350 - DNA, 20 bp, Homo sapiens
cacaggggagaagtggtttc

SEQ ID NO: 8351 - DNA, 20 bp, Homo sapiens
ggtttcaggatcagcaaagc

SEQ ID NO: 8352 - DNA, 20 bp, Homo sapiens
gtttcaggatcagcaaagca

SEQ ID NO: 8353 - DNA, 20 bp, Homo sapiens
tcaggatcagcaaagcaggg

SEQ ID NO: 8354 - DNA, 20 bp, Homo sapiens
caaagcagggaggatgttac

SEQ ID NO: 8355 - DNA, 20 bp, Homo sapiens
aaagcagggaggatgttaca

SEQ ID NO: 8356 - DNA, 20 bp, Homo sapiens
tgaccagcacgctgggaaca

SEQ ID NO: 8357 - DNA, 20 bp, Homo sapiens
ctgcaagtgaccagcacgct

SEQ ID NO: 8358 - DNA, 20 bp, Homo sapiens
ttgccttgttcccagcgtgc

SEQ ID NO: 8359 - DNA, 20 bp, Homo sapiens
gctgcaagtgaccagcacgc

SEQ ID NO: 8360 - DNA, 20 bp, Homo sapiens
gctggtcacttgcagcaaga

SEQ ID NO: 8361 - DNA, 20 bp, Homo sapiens
gcgtgtgggtaaaggaagca

SEQ ID NO: 8362 - DNA, 20 bp, Homo sapiens
aagaaatagcgtgtgggtaa

SEQ ID NO: 8363 - DNA, 20 bp, Homo sapiens
tctgcaaagaaatagcgtgt

SEQ ID NO: 8364 - DNA, 20 bp, Homo sapiens
gtctgcaaagaaatagcgtg

SEQ ID NO: 8365 - DNA, 20 bp, Homo sapiens
gcagacttatgtgcacagtg

SEQ ID NO: 8366 - DNA, 20 bp, Homo sapiens
ttatgtgcacagtgcggtgt

SEQ ID NO: 8367 - DNA, 20 bp, Homo sapiens
gtgcacagtgcggtgttggc

SEQ ID NO: 8368 - DNA, 20 bp, Homo sapiens
cacagtgcggtgttggcagg

SEQ ID NO: 8369 - DNA, 20 bp, Homo sapiens
tgcggtgttggcaggaggcg

SEQ ID NO: 8370 - DNA, 20 bp, Homo sapiens
gttggcaggaggcgtggctg

SEQ ID NO: 8371 - DNA, 20 bp, Homo sapiens
ttggcaggaggcgtggctgt

SEQ ID NO: 8372 - DNA, 20 bp, Homo sapiens
agaagggatcaggtgacacg

SEQ ID NO: 8373 - DNA, 20 bp, Homo sapiens
caagccacggagaagggatc

SEQ ID NO: 8374 - DNA, 20 bp, Homo sapiens
ccatggcaagccacggagaa

SEQ ID NO: 8375 - DNA, 20 bp, Homo sapiens
gtcacctgatcccttctccg

SEQ ID NO: 8376 - DNA, 20 bp, Homo sapiens
accatggcaagccacggaga

SEQ ID NO: 8377 - DNA, 20 bp, Homo sapiens
cccagcaccatggcaagcca

SEQ ID NO: 8378 - DNA, 20 bp, Homo sapiens
cccttctccgtggcttgcca

SEQ ID NO: 8379 - DNA, 20 bp, Homo sapiens
tccgtggcttgccatggtgc

SEQ ID NO: 8380 - DNA, 20 bp, Homo sapiens
agccacaagacccagcacca

SEQ ID NO: 8381 - DNA, 20 bp, Homo sapiens
ccgtggcttgccatggtgct

SEQ ID NO: 8382 - DNA, 20 bp, Homo sapiens
tgccatggtgctgggtcttg

SEQ ID NO: 8383 - DNA, 20 bp, Homo sapiens
atggtgctgggtcttgtggc

SEQ ID NO: 8384 - DNA, 20 bp, Homo sapiens
tggtgctgggtcttgtggct

SEQ ID NO: 8385 - DNA, 20 bp, Homo sapiens
gtggctgggctgatctccgt

SEQ ID NO: 8386 - DNA, 20 bp, Homo sapiens
tggctgggctgatctccgtc

SEQ ID NO: 8387 - DNA, 20 bp, Homo sapiens
ggctgggctgatctccgtcg

SEQ ID NO: 8388 - DNA, 20 bp, Homo sapiens
gctgggctgatctccgtcgg

SEQ ID NO: 8389 - DNA, 20 bp, Homo sapiens
caggtacttggctcccccga

SEQ ID NO: 8390 - DNA, 20 bp, Homo sapiens
gtttcttaccggcaggtact

SEQ ID NO: 8391 - DNA, 20 bp, Homo sapiens
cgggggagccaagtacctgc

SEQ ID NO: 8392 - DNA, 20 bp, Homo sapiens
ttgtctagtttcttaccggc

SEQ ID NO: 8393 - DNA, 20 bp, Homo sapiens
ttagttgtctagtttcttac

SEQ ID NO: 8394 - DNA, 20 bp, Homo sapiens
gccttcagccaaagcagagg

SEQ ID NO: 8395 - DNA, 20 bp, Homo sapiens
acaactaacctcctctgctt

SEQ ID NO: 8396 - DNA, 20 bp, Homo sapiens
ctggccttcagccaaagcag

SEQ ID NO: 8397 - DNA, 20 bp, Homo sapiens
acctcctctgctttggctga

SEQ ID NO: 8398 - DNA, 20 bp, Homo sapiens
tgctttggctgaaggccagc

SEQ ID NO: 8399 - DNA, 20 bp, Homo sapiens
atcaggtcccagcgtcctgc

SEQ ID NO: 8400 - DNA, 20 bp, Homo sapiens
gctgaaggccagcaggacgc

SEQ ID NO: 8401 - DNA, 20 bp, Homo sapiens
ctgaaggccagcaggacgct

SEQ ID NO: 8402 - DNA, 20 bp, Homo sapiens
agcaggacgctgggacctga

SEQ ID NO: 8403 - DNA, 20 bp, Homo sapiens
gcaggacgctgggacctgat

SEQ ID NO: 8404 - DNA, 20 bp, Homo sapiens
gcactgcacagtggcccatc

SEQ ID NO: 8405 - DNA, 20 bp, Homo sapiens
tgcagctgtgcactgcacag

SEQ ID NO: 8406 - DNA, 20 bp, Homo sapiens
gtgcagtgcacagctgcatt

SEQ ID NO: 8407 - DNA, 20 bp, Homo sapiens
agtgcacagctgcattaggc

SEQ ID NO: 8408 - DNA, 20 bp, Homo sapiens
cagctgcattaggcaggtgt

SEQ ID NO: 8409 - DNA, 20 bp, Homo sapiens
gtgtcggcgcattctcttat

SEQ ID NO: 8410 - DNA, 20 bp, Homo sapiens
attggcttcaacgcctagtg

SEQ ID NO: 8411 - DNA, 20 bp, Homo sapiens
ttggcttcaacgcctagtga

SEQ ID NO: 8412 - DNA, 20 bp, Homo sapiens
gccaggatggatccctcact

SEQ ID NO: 8413 - DNA, 20 bp, Homo sapiens
gcctagtgagggatccatcc

SEQ ID NO: 8414 - DNA, 20 bp, Homo sapiens
aatgcgccaccgagccagga

SEQ ID NO: 8415 - DNA, 20 bp, Homo sapiens
gtgagggatccatcctggct

SEQ ID NO: 8416 - DNA, 20 bp, Homo sapiens
aacaaatgcgccaccgagcc

SEQ ID NO: 8417 - DNA, 20 bp, Homo sapiens
agggatccatcctggctcgg

SEQ ID NO: 8418 - DNA, 20 bp, Homo sapiens
ggcgcatttgttaagatgct

SEQ ID NO: 8419 - DNA, 20 bp, Homo sapiens
gcgcatttgttaagatgctc

SEQ ID NO: 8420 - DNA, 20 bp, Homo sapiens
ttgttaagatgctcgggagc

SEQ ID NO: 8421 - DNA, 20 bp, Homo sapiens
ttaagatgctcgggagcagg

SEQ ID NO: 8422 - DNA, 20 bp, Homo sapiens
atgcccaagcaagctcaaat

SEQ ID NO: 8423 - DNA, 20 bp, Homo sapiens
aatgcccaagcaagctcaaa

SEQ ID NO: 8424 - DNA, 20 bp, Homo sapiens
agaacccatttgagcttgct

SEQ ID NO: 8425 - DNA, 20 bp, Homo sapiens
gaacccatttgagcttgctt

SEQ ID NO: 8426 - DNA, 20 bp, Homo sapiens
atttgagcttgcttgggcat

SEQ ID NO: 8427 - DNA, 20 bp, Homo sapiens
tttgagcttgcttgggcatt

SEQ ID NO: 8428 - DNA, 20 bp, Homo sapiens
ttgagcttgcttgggcattg

SEQ ID NO: 8429 - DNA, 20 bp, Homo sapiens
attggggagaatttgttatc

SEQ ID NO: 8430 - DNA, 20 bp, Homo sapiens
agaatttgttatcaggctac

SEQ ID NO: 8431 - DNA, 20 bp, Homo sapiens
gaatttgttatcaggctact

SEQ ID NO: 8432 - DNA, 20 bp, Homo sapiens
aatttgttatcaggctactg

SEQ ID NO: 8433 - DNA, 20 bp, Homo sapiens
ctggggtgtcacagaactca

SEQ ID NO: 8434 - DNA, 20 bp, Homo sapiens
gtgtcacagaactcaaggac

SEQ ID NO: 8435 - DNA, 20 bp, Homo sapiens
tgtcacagaactcaaggaca

SEQ ID NO: 8436 - DNA, 20 bp, Homo sapiens
cagaactcaaggacagggac

SEQ ID NO: 8437 - DNA, 20 bp, Homo sapiens
ggacagggactggagtgttg

SEQ ID NO: 8438 - DNA, 20 bp, Homo sapiens
gacagggactggagtgttgt

SEQ ID NO: 8439 - DNA, 20 bp, Homo sapiens
acagggactggagtgttgtg

SEQ ID NO: 8440 - DNA, 20 bp, Homo sapiens
gaagtaaaacaggggcttcg

SEQ ID NO: 8441 - DNA, 20 bp, Homo sapiens
agaagtaaaacaggggcttc

SEQ ID NO: 8442 - DNA, 20 bp, Homo sapiens
aagaagtaaaacaggggctt

SEQ ID NO: 8443 - DNA, 20 bp, Homo sapiens
caaagaaagaagtaaaacag

SEQ ID NO: 8444 - DNA, 20 bp, Homo sapiens
gcaaagaaagaagtaaaaca

SEQ ID NO: 8445 - DNA, 20 bp, Homo sapiens
agcaaagaaagaagtaaaac

SEQ ID NO: 8446 - DNA, 20 bp, Homo sapiens
taagaataaagcagatattc

SEQ ID NO: 8447 - DNA, 20 bp, Homo sapiens
acaatgtggggtgaaagagg

SEQ ID NO: 8448 - DNA, 20 bp, Homo sapiens
cccacaatgtggggtgaaag

SEQ ID NO: 8449 - DNA, 20 bp, Homo sapiens
agactacaccccacaatgtg

SEQ ID NO: 8450 - DNA, 20 bp, Homo sapiens
tcctctttcaccccacattg

SEQ ID NO: 8451 - DNA, 20 bp, Homo sapiens
aagactacaccccacaatgt

SEQ ID NO: 8452 - DNA, 20 bp, Homo sapiens
cctctttcaccccacattgt

SEQ ID NO: 8453 - DNA, 20 bp, Homo sapiens
aaagactacaccccacaatg

SEQ ID NO: 8454 - DNA, 20 bp, Homo sapiens
ctctttcaccccacattgtg

SEQ ID NO: 8455 - DNA, 20 bp, Homo sapiens
tttgcttcaagaaagcagcc

SEQ ID NO: 8456 - DNA, 20 bp, Homo sapiens
gcttcaagaaagcagcctgg

SEQ ID NO: 8457 - DNA, 20 bp, Homo sapiens
caagaaagcagcctggtgga

SEQ ID NO: 8458 - DNA, 20 bp, Homo sapiens
gccaagagattccatccacc

SEQ ID NO: 8459 - DNA, 20 bp, Homo sapiens
gcctggtggatggaatctct

SEQ ID NO: 8460 - DNA, 20 bp, Homo sapiens
ctccagagaatttgggattg

SEQ ID NO: 8461 - DNA, 20 bp, Homo sapiens
tctccagagaatttgggatt

SEQ ID NO: 8462 - DNA, 20 bp, Homo sapiens
ttctccagagaatttgggat

SEQ ID NO: 8463 - DNA, 20 bp, Homo sapiens
gccccttctccagagaattt

SEQ ID NO: 8464 - DNA, 20 bp, Homo sapiens
agccccttctccagagaatt

SEQ ID NO: 8465 - DNA, 20 bp, Homo sapiens
ggccccaatcccaaattctc

SEQ ID NO: 8466 - DNA, 20 bp, Homo sapiens
aatcccaaattctctggaga

SEQ ID NO: 8467 - DNA, 20 bp, Homo sapiens
atcccaaattctctggagaa

SEQ ID NO: 8468 - DNA, 20 bp, Homo sapiens
tcccaaattctctggagaag

SEQ ID NO: 8469 - DNA, 20 bp, Homo sapiens
tctctggagaaggggctctt

SEQ ID NO: 8470 - DNA, 20 bp, Homo sapiens
aggggctctttggtttaact

SEQ ID NO: 8471 - DNA, 20 bp, Homo sapiens
tggataatgttgtcttcagc

SEQ ID NO: 8472 - DNA, 20 bp, Homo sapiens
ggataatgttgtcttcagct

SEQ ID NO: 8473 - DNA, 20 bp, Homo sapiens
gataatgttgtcttcagctg

SEQ ID NO: 8474 - DNA, 20 bp, Homo sapiens
ataatgttgtcttcagctgg

SEQ ID NO: 8475 - DNA, 20 bp, Homo sapiens
atgttgtcttcagctggggg

SEQ ID NO: 8476 - DNA, 20 bp, Homo sapiens
tgttgtcttcagctgggggt

SEQ ID NO: 8477 - DNA, 20 bp, Homo sapiens
gtgggcacatcgtgcatatg

SEQ ID NO: 8478 - DNA, 20 bp, Homo sapiens
cgtgcatatgtggctgctgc

SEQ ID NO: 8479 - DNA, 20 bp, Homo sapiens
gtgcatatgtggctgctgcc

SEQ ID NO: 8480 - DNA, 20 bp, Homo sapiens
tgcatatgtggctgctgccg

SEQ ID NO: 8481 - DNA, 20 bp, Homo sapiens
acatcatccacgtggttccc

SEQ ID NO: 8482 - DNA, 20 bp, Homo sapiens
gctgctgccggggaaccacg

SEQ ID NO: 8483 - DNA, 20 bp, Homo sapiens
ctcctctcacatcatccacg

SEQ ID NO: 8484 - DNA, 20 bp, Homo sapiens
aaccacgtggatgatgtgag

SEQ ID NO: 8485 - DNA, 20 bp, Homo sapiens
agaggagcagcacccagaag

SEQ ID NO: 8486 - DNA, 20 bp, Homo sapiens
gaggagcagcacccagaaga

SEQ ID NO: 8487 - DNA, 20 bp, Homo sapiens
agcccagcactccctcttct

SEQ ID NO: 8488 - DNA, 20 bp, Homo sapiens
cagcccagcactccctcttc

SEQ ID NO: 8489 - DNA, 20 bp, Homo sapiens
gcacccagaagagggagtgc

SEQ ID NO: 8490 - DNA, 20 bp, Homo sapiens
cacccagaagagggagtgct

SEQ ID NO: 8491 - DNA, 20 bp, Homo sapiens
aagagggagtgctgggctga

SEQ ID NO: 8492 - DNA, 20 bp, Homo sapiens
gagtgctgggctgatggtcc

SEQ ID NO: 8493 - DNA, 20 bp, Homo sapiens
aatcagaagtggacacgacc

SEQ ID NO: 8494 - DNA, 20 bp, Homo sapiens
aagaattaaacaatcagaag

SEQ ID NO: 8495 - DNA, 20 bp, Homo sapiens
tgtttaattcttcttctaag

SEQ ID NO: 8496 - DNA, 20 bp, Homo sapiens
taattcttcttctaagtgga

SEQ ID NO: 8497 - DNA, 20 bp, Homo sapiens
gatcaggatttgctgagtat

SEQ ID NO: 8498 - DNA, 20 bp, Homo sapiens
tgaagtattctggaacgatc

SEQ ID NO: 8499 - DNA, 20 bp, Homo sapiens
ttggctataatgaagtattc

SEQ ID NO: 8500 - DNA, 20 bp, Homo sapiens
aatacttcattatagccaat

SEQ ID NO: 8501 - DNA, 20 bp, Homo sapiens
agaagcacattataaccaat

SEQ ID NO: 8502 - DNA, 20 bp, Homo sapiens
cttctctaagagaaatattt

SEQ ID NO: 8503 - DNA, 20 bp, Homo sapiens
ttctctaagagaaatattta

SEQ ID NO: 8504 - DNA, 20 bp, Homo sapiens
ttagggacaacaaatcttca

SEQ ID NO: 8505 - DNA, 20 bp, Homo sapiens
tagggacaacaaatcttcat

SEQ ID NO: 8506 - DNA, 20 bp, Homo sapiens
tcatgggtttgaagacttga

SEQ ID NO: 8507 - DNA, 20 bp, Homo sapiens
tgggtttgaagacttgatgg

SEQ ID NO: 8508 - DNA, 20 bp, Homo sapiens
gaagacttgatggaggaaaa

SEQ ID NO: 8509 - DNA, 20 bp, Homo sapiens
aaaaaggagtagattttcga

SEQ ID NO: 8510 - DNA, 20 bp, Homo sapiens
aggagtagattttcgaaggc

SEQ ID NO: 8511 - DNA, 20 bp, Homo sapiens
agattttcgaaggctggatt

SEQ ID NO: 8512 - DNA, 20 bp, Homo sapiens
aaggctggatttggatgaac

SEQ ID NO: 8513 - DNA, 20 bp, Homo sapiens
aggctggatttggatgaaca

SEQ ID NO: 8514 - DNA, 20 bp, Homo sapiens
ggctggatttggatgaacag

SEQ ID NO: 8515 - DNA, 20 bp, Homo sapiens
tggatgaacaggggctattc

SEQ ID NO: 8516 - DNA, 20 bp, Homo sapiens
ggatgaacaggggctattca

SEQ ID NO: 8517 - DNA, 20 bp, Homo sapiens
agtttttcctaattttaggt

SEQ ID NO: 8518 - DNA, 20 bp, Homo sapiens
gtgcattccaacctaaaatt

SEQ ID NO: 8519 - DNA, 20 bp, Homo sapiens
agccagtttttcctaatttt

SEQ ID NO: 8520 - DNA, 20 bp, Homo sapiens
aacctaaaattaggaaaaac

SEQ ID NO: 8521 - DNA, 20 bp, Homo sapiens
taaaattaggaaaaactggc

SEQ ID NO: 8522 - DNA, 20 bp, Homo sapiens
aaaattaggaaaaactggct

SEQ ID NO: 8523 - DNA, 20 bp, Homo sapiens
gaaaaactggctgggcgcag

SEQ ID NO: 8524 - DNA, 20 bp, Homo sapiens
gcgcagtggctcacgcgctt

SEQ ID NO: 8525 - DNA, 20 bp, Homo sapiens
cgcagtggctcacgcgcttt

SEQ ID NO: 8526 - DNA, 20 bp, Homo sapiens
agtggctcacgcgctttggg

SEQ ID NO: 8527 - DNA, 20 bp, Homo sapiens
tcacgcgctttgggaggccg

SEQ ID NO: 8528 - DNA, 20 bp, Homo sapiens
cgcgctttgggaggccgagg

SEQ ID NO: 8529 - DNA, 20 bp, Homo sapiens
gcgctttgggaggccgaggc

SEQ ID NO: 8530 - DNA, 20 bp, Homo sapiens
ctcaggccatctgcccgcct

SEQ ID NO: 8531 - DNA, 20 bp, Homo sapiens
gggaggccgaggcgggcaga

SEQ ID NO: 8532 - DNA, 20 bp, Homo sapiens
cgaggcgggcagatggcctg

SEQ ID NO: 8533 - DNA, 20 bp, Homo sapiens
cgggcagatggcctgaggtc

SEQ ID NO: 8534 - DNA, 20 bp, Homo sapiens
ggtcttgaactcctgacctc

SEQ ID NO: 8535 - DNA, 20 bp, Homo sapiens
tcaggagttcaagaccagcc

SEQ ID NO: 8536 - DNA, 20 bp, Homo sapiens
tttcaccatgttggccaggc

SEQ ID NO: 8537 - DNA, 20 bp, Homo sapiens
tgggtttcaccatgttggcc

SEQ ID NO: 8538 - DNA, 20 bp, Homo sapiens
caagaccagcctggccaaca

SEQ ID NO: 8539 - DNA, 20 bp, Homo sapiens
agagatgggtttcaccatgt

SEQ ID NO: 8540 - DNA, 20 bp, Homo sapiens
tttgtacttttagtagagat

SEQ ID NO: 8541 - DNA, 20 bp, Homo sapiens
ttttgtacttttagtagaga

SEQ ID NO: 8542 - DNA, 20 bp, Homo sapiens
taaaagtacaaaaattagcc

SEQ ID NO: 8543 - DNA, 20 bp, Homo sapiens
gtacaaaaattagccaggca

SEQ ID NO: 8544 - DNA, 20 bp, Homo sapiens
caggtgcccgccaccatgcc

SEQ ID NO: 8545 - DNA, 20 bp, Homo sapiens
caaaaattagccaggcatgg

SEQ ID NO: 8546 - DNA, 20 bp, Homo sapiens
aaattagccaggcatggtgg

SEQ ID NO: 8547 - DNA, 20 bp, Homo sapiens
aattagccaggcatggtggc

SEQ ID NO: 8548 - DNA, 20 bp, Homo sapiens
tcctgagtcgctaagatgac

SEQ ID NO: 8549 - DNA, 20 bp, Homo sapiens
acctgtcatcttagcgactc

SEQ ID NO: 8550 - DNA, 20 bp, Homo sapiens
tgtcatcttagcgactcagg

SEQ ID NO: 8551 - DNA, 20 bp, Homo sapiens
acacgagaatcacttgaacc

SEQ ID NO: 8552 - DNA, 20 bp, Homo sapiens
cacgagaatcacttgaacct

SEQ ID NO: 8553 - DNA, 20 bp, Homo sapiens
cactgcaagctctgtctccc

SEQ ID NO: 8554 - DNA, 20 bp, Homo sapiens
agtgagctgaaatcgtgcca

SEQ ID NO: 8555 - DNA, 20 bp, Homo sapiens
tcgcccaggctggagtgcca

SEQ ID NO: 8556 - DNA, 20 bp, Homo sapiens
cgtgccatggcactccagcc

SEQ ID NO: 8557 - DNA, 20 bp, Homo sapiens
gtgccatggcactccagcct

SEQ ID NO: 8558 - DNA, 20 bp, Homo sapiens
tcttgttctgtcgcccaggc

SEQ ID NO: 8559 - DNA, 20 bp, Homo sapiens
agagtcttgttctgtcgccc

SEQ ID NO: 8560 - DNA, 20 bp, Homo sapiens
tgtcttaaaaaaaaaaaaag

SEQ ID NO: 8561 - DNA, 20 bp, Homo sapiens
aaagtggtttatatacagag

SEQ ID NO: 8562 - DNA, 20 bp, Homo sapiens
acaggatttcattcttttta

SEQ ID NO: 8563 - DNA, 20 bp, Homo sapiens
tccatgttgctgcaaatgac

SEQ ID NO: 8564 - DNA, 20 bp, Homo sapiens
tcctgtcatttgcagcaaca

SEQ ID NO: 8565 - DNA, 20 bp, Homo sapiens
gtcatttgcagcaacatgga

SEQ ID NO: 8566 - DNA, 20 bp, Homo sapiens
tgcagcaacatggatggaac

SEQ ID NO: 8567 - DNA, 20 bp, Homo sapiens
agcaacatggatggaactgg

SEQ ID NO: 8568 - DNA, 20 bp, Homo sapiens
ttaaaaaataaaattaaata

SEQ ID NO: 8569 - DNA, 20 bp, Homo sapiens
tacttcgattaaccaaaacc

SEQ ID NO: 8570 - DNA, 20 bp, Homo sapiens
acttcgattaaccaaaacca

SEQ ID NO: 8571 - DNA, 20 bp, Homo sapiens
aatcagatttgccctggttt

SEQ ID NO: 8572 - DNA, 20 bp, Homo sapiens
gatgaaaatcagatttgccc

SEQ ID NO: 8573 - DNA, 20 bp, Homo sapiens
atctgattttcatctttgca

SEQ ID NO: 8574 - DNA, 20 bp, Homo sapiens
tctgattttcatctttgcaa

SEQ ID NO: 8575 - DNA, 20 bp, Homo sapiens
ctgattttcatctttgcaag

SEQ ID NO: 8576 - DNA, 20 bp, Homo sapiens
caaatttcttttatctcctc

SEQ ID NO: 8577 - DNA, 20 bp, Homo sapiens
tttcagggtttcaaagccag

SEQ ID NO: 8578 - DNA, 20 bp, Homo sapiens
cccttcctcctttcatttca

SEQ ID NO: 8579 - DNA, 20 bp, Homo sapiens
gcccttcctcctttcatttc

SEQ ID NO: 8580 - DNA, 20 bp, Homo sapiens
ctttgaaaccctgaaatgaa

SEQ ID NO: 8581 - DNA, 20 bp, Homo sapiens
tgaaaccctgaaatgaaagg

SEQ ID NO: 8582 - DNA, 20 bp, Homo sapiens
accctgaaatgaaaggagga

SEQ ID NO: 8583 - DNA, 20 bp, Homo sapiens
ccctgaaatgaaaggaggaa

SEQ ID NO: 8584 - DNA, 20 bp, Homo sapiens
acaagctcagggaatgcgat

SEQ ID NO: 8585 - DNA, 20 bp, Homo sapiens
aacaagctcagggaatgcga

SEQ ID NO: 8586 - DNA, 20 bp, Homo sapiens
aagtcaaggaaacaagctca

SEQ ID NO: 8587 - DNA, 20 bp, Homo sapiens
gaagtcaaggaaacaagctc

SEQ ID NO: 8588 - DNA, 20 bp, Homo sapiens
tcctgccagtgatgaagtca

SEQ ID NO: 8589 - DNA, 20 bp, Homo sapiens
tgtttccttgacttcatcac

SEQ ID NO: 8590 - DNA, 20 bp, Homo sapiens
tccttgacttcatcactggc

SEQ ID NO: 8591 - DNA, 20 bp, Homo sapiens
aaaacgtatgtgttgaatga

SEQ ID NO: 8592 - DNA, 20 bp, Homo sapiens
ctatagtttagtgagcgaaa

SEQ ID NO: 8593 - DNA, 20 bp, Homo sapiens
tacagtgtgagaacagcaag

SEQ ID NO: 8594 - DNA, 20 bp, Homo sapiens
acagtgtgagaacagcaaga

SEQ ID NO: 8595 - DNA, 20 bp, Homo sapiens
agggcacatctgagctagcc

SEQ ID NO: 8596 - DNA, 20 bp, Homo sapiens
gggcacatctgagctagcct

SEQ ID NO: 8597 - DNA, 20 bp, Homo sapiens
acatctgagctagcctggga

SEQ ID NO: 8598 - DNA, 20 bp, Homo sapiens
catctgagctagcctgggat

SEQ ID NO: 8599 - DNA, 20 bp, Homo sapiens
agcatttccagacccatccc

SEQ ID NO: 8600 - DNA, 20 bp, Homo sapiens
gagctagcctgggatgggtc

SEQ ID NO: 8601 - DNA, 20 bp, Homo sapiens
atgggtctggaaatgcttcc

SEQ ID NO: 8602 - DNA, 20 bp, Homo sapiens
tcaaccgtttcctctgctcc

SEQ ID NO: 8603 - DNA, 20 bp, Homo sapiens
ggaaatgcttcctggagcag

SEQ ID NO: 8604 - DNA, 20 bp, Homo sapiens
gcttcctggagcagaggaaa

SEQ ID NO: 8605 - DNA, 20 bp, Homo sapiens
actacttctctgtcaacact

SEQ ID NO: 8606 - DNA, 20 bp, Homo sapiens
acagagaagtagtattagcc

SEQ ID NO: 8607 - DNA, 20 bp, Homo sapiens
acattccccatgtctctgcc

SEQ ID NO: 8608 - DNA, 20 bp, Homo sapiens
gtattagccaggcagagaca

SEQ ID NO: 8609 - DNA, 20 bp, Homo sapiens
tattagccaggcagagacat

SEQ ID NO: 8610 - DNA, 20 bp, Homo sapiens
attagccaggcagagacatg

SEQ ID NO: 8611 - DNA, 20 bp, Homo sapiens
agacatggggaatgtattcc

SEQ ID NO: 8612 - DNA, 20 bp, Homo sapiens
gggaatgtattccaggcaga

SEQ ID NO: 8613 - DNA, 20 bp, Homo sapiens
tacacactgtgccttctgcc

SEQ ID NO: 8614 - DNA, 20 bp, Homo sapiens
ttattgttaagaagagtgtg

SEQ ID NO: 8615 - DNA, 20 bp, Homo sapiens
gaagagtgtgtggcccaacc

SEQ ID NO: 8616 - DNA, 20 bp, Homo sapiens
agaatgtctgtttcctggtt

SEQ ID NO: 8617 - DNA, 20 bp, Homo sapiens
tagaatgtctgtttcctggt

SEQ ID NO: 8618 - DNA, 20 bp, Homo sapiens
cctttagaatgtctgtttcc

SEQ ID NO: 8619 - DNA, 20 bp, Homo sapiens
ccaggaaacagacattctaa

SEQ ID NO: 8620 - DNA, 20 bp, Homo sapiens
aacagacattctaaaggcat

SEQ ID NO: 8621 - DNA, 20 bp, Homo sapiens
acagacattctaaaggcata

SEQ ID NO: 8622 - DNA, 20 bp, Homo sapiens
taaaggcatagggtccaccc

SEQ ID NO: 8623 - DNA, 20 bp, Homo sapiens
gggtccaccatgctcctggg

SEQ ID NO: 8624 - DNA, 20 bp, Homo sapiens
tctgggtccaccatgctcct

SEQ ID NO: 8625 - DNA, 20 bp, Homo sapiens
atagggtccacccaggagca

SEQ ID NO: 8626 - DNA, 20 bp, Homo sapiens
atctgggtccaccatgctcc

SEQ ID NO: 8627 - DNA, 20 bp, Homo sapiens
gggtccacccaggagcatgg

SEQ ID NO: 8628 - DNA, 20 bp, Homo sapiens
ctcccatctttcagggatct

SEQ ID NO: 8629 - DNA, 20 bp, Homo sapiens
cctcccatctttcagggatc

SEQ ID NO: 8630 - DNA, 20 bp, Homo sapiens
tgagcacctcccatctttca

SEQ ID NO: 8631 - DNA, 20 bp, Homo sapiens
ggacccagatccctgaaaga

SEQ ID NO: 8632 - DNA, 20 bp, Homo sapiens
ctgagcacctcccatctttc

SEQ ID NO: 8633 - DNA, 20 bp, Homo sapiens
gacccagatccctgaaagat

SEQ ID NO: 8634 - DNA, 20 bp, Homo sapiens
ccagatccctgaaagatggg

SEQ ID NO: 8635 - DNA, 20 bp, Homo sapiens
ctgaaagatgggaggtgctc

SEQ ID NO: 8636 - DNA, 20 bp, Homo sapiens
aggtgctcaggcacacttcc

SEQ ID NO: 8637 - DNA, 20 bp, Homo sapiens
ggtgctcaggcacacttcct

SEQ ID NO: 8638 - DNA, 20 bp, Homo sapiens
ccagactcctcaactagccc

SEQ ID NO: 8639 - DNA, 20 bp, Homo sapiens
cacacttcctgggctagttg

SEQ ID NO: 8640 - DNA, 20 bp, Homo sapiens
cctgggctagttgaggagtc

SEQ ID NO: 8641 - DNA, 20 bp, Homo sapiens
agagtctcattctgtcaccc

SEQ ID NO: 8642 - DNA, 20 bp, Homo sapiens
tctcattctgtcacccaggc

SEQ ID NO: 8643 - DNA, 20 bp, Homo sapiens
gcaccactgcactccagcct

SEQ ID NO: 8644 - DNA, 20 bp, Homo sapiens
tgcaccactgcactccagcc

SEQ ID NO: 8645 - DNA, 20 bp, Homo sapiens
tcacccaggctggagtgcag

SEQ ID NO: 8646 - DNA, 20 bp, Homo sapiens
cacttgaacccaggaggtgg

SEQ ID NO: 8647 - DNA, 20 bp, Homo sapiens
tcactgcaacctccacctcc

SEQ ID NO: 8648 - DNA, 20 bp, Homo sapiens
cactgcaacctccacctcct

SEQ ID NO: 8649 - DNA, 20 bp, Homo sapiens
aatcacttgaacccaggagg

SEQ ID NO: 8650 - DNA, 20 bp, Homo sapiens
gagaatcacttgaacccagg

SEQ ID NO: 8651 - DNA, 20 bp, Homo sapiens
taggagaatcacttgaaccc

SEQ ID NO: 8652 - DNA, 20 bp, Homo sapiens
gctactcaggaggctgaggt

SEQ ID NO: 8653 - DNA, 20 bp, Homo sapiens
cccagctactcaggaggctg

SEQ ID NO: 8654 - DNA, 20 bp, Homo sapiens
tgtaatcccagctactcagg

SEQ ID NO: 8655 - DNA, 20 bp, Homo sapiens
acctgtaatcccagctactc

SEQ ID NO: 8656 - DNA, 20 bp, Homo sapiens
acctcagcctcctgagtagc

SEQ ID NO: 8657 - DNA, 20 bp, Homo sapiens
cctcagcctcctgagtagct

SEQ ID NO: 8658 - DNA, 20 bp, Homo sapiens
tcctgagtagctgggattac

SEQ ID NO: 8659 - DNA, 20 bp, Homo sapiens
aattagccaggcatggtggt

SEQ ID NO: 8660 - DNA, 20 bp, Homo sapiens
aaattagccaggcatggtgg

SEQ ID NO: 8661 - DNA, 20 bp, Homo sapiens
cgaaaattagccaggcatgg

SEQ ID NO: 8662 - DNA, 20 bp, Homo sapiens
caggtgcccaccaccatgcc

SEQ ID NO: 8663 - DNA, 20 bp, Homo sapiens
acacgaaaattagccaggca

SEQ ID NO: 8664 - DNA, 20 bp, Homo sapiens
tacacacacgaaaattagcc

SEQ ID NO: 8665 - DNA, 20 bp, Homo sapiens
tgttgttgttgttgttgaga

SEQ ID NO: 8666 - DNA, 20 bp, Homo sapiens
ggtgtctcgctcttttgccc

SEQ ID NO: 8667 - DNA, 20 bp, Homo sapiens
tctcgctcttttgcccaggc

SEQ ID NO: 8668 - DNA, 20 bp, Homo sapiens
gcgccactgcactccagcct

SEQ ID NO: 8669 - DNA, 20 bp, Homo sapiens
ggcgccactgcactccagcc

SEQ ID NO: 8670 - DNA, 20 bp, Homo sapiens
ttgcccaggctggagtgcag

SEQ ID NO: 8671 - DNA, 20 bp, Homo sapiens
gagcttgcagtaagctgaga

SEQ ID NO: 8672 - DNA, 20 bp, Homo sapiens
ttactgcaagctccgcctcc

SEQ ID NO: 8673 - DNA, 20 bp, Homo sapiens
tactgcaagctccgcctccc

SEQ ID NO: 8674 - DNA, 20 bp, Homo sapiens
aatggtgtgaacccgggagg

SEQ ID NO: 8675 - DNA, 20 bp, Homo sapiens
gagaatggtgtgaacccggg

SEQ ID NO: 8676 - DNA, 20 bp, Homo sapiens
caggagaatggtgtgaaccc

SEQ ID NO: 8677 - DNA, 20 bp, Homo sapiens
gcaggagaatggtgtgaacc

SEQ ID NO: 8678 - DNA, 20 bp, Homo sapiens
aggaggctgaggcaggagaa

SEQ ID NO: 8679 - DNA, 20 bp, Homo sapiens
gctactcaggaggctgaggc

SEQ ID NO: 8680 - DNA, 20 bp, Homo sapiens
cccagctactcaggaggctg

SEQ ID NO: 8681 - DNA, 20 bp, Homo sapiens
tgtagacccagctactcagg

SEQ ID NO: 8682 - DNA, 20 bp, Homo sapiens
gcctgtagacccagctactc

SEQ ID NO: 8683 - DNA, 20 bp, Homo sapiens
gcctcagcctcctgagtagc

SEQ ID NO: 8684 - DNA, 20 bp, Homo sapiens
cctcagcctcctgagtagct

SEQ ID NO: 8685 - DNA, 20 bp, Homo sapiens
tcctgagtagctgggtctac

SEQ ID NO: 8686 - DNA, 20 bp, Homo sapiens
aattagctgggcgtggtggt

SEQ ID NO: 8687 - DNA, 20 bp, Homo sapiens
aaattagctgggcgtggtgg

SEQ ID NO: 8688 - DNA, 20 bp, Homo sapiens
aaaaaattagctgggcgtgg

SEQ ID NO: 8689 - DNA, 20 bp, Homo sapiens
cacaaaaaattagctgggcg

SEQ ID NO: 8690 - DNA, 20 bp, Homo sapiens
aaaaacacaaaaaattagct

SEQ ID NO: 8691 - DNA, 20 bp, Homo sapiens
taaaaacacaaaaaattagc

SEQ ID NO: 8692 - DNA, 20 bp, Homo sapiens
ttttgtgtttttagtagaga

SEQ ID NO: 8693 - DNA, 20 bp, Homo sapiens
tttgtgtttttagtagagac

SEQ ID NO: 8694 - DNA, 20 bp, Homo sapiens
ttgtgtttttagtagagacg

SEQ ID NO: 8695 - DNA, 20 bp, Homo sapiens
gagacggggtttcaccatgt

SEQ ID NO: 8696 - DNA, 20 bp, Homo sapiens
caagaccagcagggccaaca

SEQ ID NO: 8697 - DNA, 20 bp, Homo sapiens
tttcaccatgttggccctgc

SEQ ID NO: 8698 - DNA, 20 bp, Homo sapiens
tcgggagttcaagaccagca

SEQ ID NO: 8699 - DNA, 20 bp, Homo sapiens
gtcgggagttcaagaccagc

SEQ ID NO: 8700 - DNA, 20 bp, Homo sapiens
ggtcttgaactcccgacttc

SEQ ID NO: 8701 - DNA, 20 bp, Homo sapiens
tgggtggatcacctgaagtc

SEQ ID NO: 8702 - DNA, 20 bp, Homo sapiens
atgggtggatcacctgaagt

SEQ ID NO: 8703 - DNA, 20 bp, Homo sapiens
ctttgggaggccgacatggg

SEQ ID NO: 8704 - DNA, 20 bp, Homo sapiens
ttcaggtgatccacccatgt

SEQ ID NO: 8705 - DNA, 20 bp, Homo sapiens
gcactttgggaggccgacat

SEQ ID NO: 8706 - DNA, 20 bp, Homo sapiens
agcactttgggaggccgaca

SEQ ID NO: 8707 - DNA, 20 bp, Homo sapiens
tgtaatcccagcactttggg

SEQ ID NO: 8708 - DNA, 20 bp, Homo sapiens
gcctgtaatcccagcacttt

SEQ ID NO: 8709 - DNA, 20 bp, Homo sapiens
atgtcggcctcccaaagtgc

SEQ ID NO: 8710 - DNA, 20 bp, Homo sapiens
tgcctgtaatcccagcactt

SEQ ID NO: 8711 - DNA, 20 bp, Homo sapiens
tgtcggcctcccaaagtgct

SEQ ID NO: 8712 - DNA, 20 bp, Homo sapiens
tcccaaagtgctgggattac

SEQ ID NO: 8713 - DNA, 20 bp, Homo sapiens
aaaatccaggttgggcacgg

SEQ ID NO: 8714 - DNA, 20 bp, Homo sapiens
ataaaaatccaggttgggca

SEQ ID NO: 8715 - DNA, 20 bp, Homo sapiens
atgagccaccgtgcccaacc

SEQ ID NO: 8716 - DNA, 20 bp, Homo sapiens
tcagaataaaaatccaggtt

SEQ ID NO: 8717 - DNA, 20 bp, Homo sapiens
ttcagaataaaaatccaggt

SEQ ID NO: 8718 - DNA, 20 bp, Homo sapiens
agtcttcagaataaaaatcc

SEQ ID NO: 8719 - DNA, 20 bp, Homo sapiens
tttttattctgaagactaat

SEQ ID NO: 8720 - DNA, 20 bp, Homo sapiens
ttttattctgaagactaata

SEQ ID NO: 8721 - DNA, 20 bp, Homo sapiens
gaagactaatagggattcta

SEQ ID NO: 8722 - DNA, 20 bp, Homo sapiens
actaatagggattctaagga

SEQ ID NO: 8723 - DNA, 20 bp, Homo sapiens
atatgcaaattcaatcaggc

SEQ ID NO: 8724 - DNA, 20 bp, Homo sapiens
acacatatgcaaattcaatc

SEQ ID NO: 8725 - DNA, 20 bp, Homo sapiens
cagccgtgagccagcagatg

SEQ ID NO: 8726 - DNA, 20 bp, Homo sapiens
gcatatgtgtccacatctgc

SEQ ID NO: 8727 - DNA, 20 bp, Homo sapiens
tgtccacatctgctggctca

SEQ ID NO: 8728 - DNA, 20 bp, Homo sapiens
tctgctggctcacggctgtg

SEQ ID NO: 8729 - DNA, 20 bp, Homo sapiens
ctgctggctcacggctgtgt

SEQ ID NO: 8730 - DNA, 20 bp, Homo sapiens
ctggctcacggctgtgtggg

SEQ ID NO: 8731 - DNA, 20 bp, Homo sapiens
ctgtgtgggaggctgagtga

SEQ ID NO: 8732 - DNA, 20 bp, Homo sapiens
tgtgtgggaggctgagtgat

SEQ ID NO: 8733 - DNA, 20 bp, Homo sapiens
gtgtgggaggctgagtgatg

SEQ ID NO: 8734 - DNA, 20 bp, Homo sapiens
tgggaggctgagtgatgggg

SEQ ID NO: 8735 - DNA, 20 bp, Homo sapiens
aggctgagtgatggggagga

SEQ ID NO: 8736 - DNA, 20 bp, Homo sapiens
gggaggaaggattactgagt

SEQ ID NO: 8737 - DNA, 20 bp, Homo sapiens
ggaggaaggattactgagta

SEQ ID NO: 8738 - DNA, 20 bp, Homo sapiens
attactgagtagggatctga

SEQ ID NO: 8739 - DNA, 20 bp, Homo sapiens
tgagtagggatctgaaggtg

SEQ ID NO: 8740 - DNA, 20 bp, Homo sapiens
ctggttagaaagaaagcatg

SEQ ID NO: 8741 - DNA, 20 bp, Homo sapiens
catcccaaagacaacacagc

SEQ ID NO: 8742 - DNA, 20 bp, Homo sapiens
ctaaccagctgtgttgtctt

SEQ ID NO: 8743 - DNA, 20 bp, Homo sapiens
taaccagctgtgttgtcttt

SEQ ID NO: 8744 - DNA, 20 bp, Homo sapiens
cagctgtgttgtctttggga

SEQ ID NO: 8745 - DNA, 20 bp, Homo sapiens
tttgggatggtgcttaaatt

SEQ ID NO: 8746 - DNA, 20 bp, Homo sapiens
ttgggatggtgcttaaattt

SEQ ID NO: 8747 - DNA, 20 bp, Homo sapiens
ttaaatttgggctagaccag

SEQ ID NO: 8748 - DNA, 20 bp, Homo sapiens
taaatttgggctagaccagt

SEQ ID NO: 8749 - DNA, 20 bp, Homo sapiens
ggggggtgaccaagacccac

SEQ ID NO: 8750 - DNA, 20 bp, Homo sapiens
tgggctagaccagtgggtct

SEQ ID NO: 8751 - DNA, 20 bp, Homo sapiens
gtgggtcttggtcacccccc

SEQ ID NO: 8752 - DNA, 20 bp, Homo sapiens
tgggtcttggtcacccccca

SEQ ID NO: 8753 - DNA, 20 bp, Homo sapiens
gggtcttggtcaccccccag

SEQ ID NO: 8754 - DNA, 20 bp, Homo sapiens
attgtaagatgtcccctggg

SEQ ID NO: 8755 - DNA, 20 bp, Homo sapiens
cattgtaagatgtcccctgg

SEQ ID NO: 8756 - DNA, 20 bp, Homo sapiens
acattgtaagatgtcccctg

SEQ ID NO: 8757 - DNA, 20 bp, Homo sapiens
gacattgtaagatgtcccct

SEQ ID NO: 8758 - DNA, 20 bp, Homo sapiens
agacattgtaagatgtcccc

SEQ ID NO: 8759 - DNA, 20 bp, Homo sapiens
aggggacatcttacaatgtc

SEQ ID NO: 8760 - DNA, 20 bp, Homo sapiens
ggacatcttacaatgtctgg

SEQ ID NO: 8761 - DNA, 20 bp, Homo sapiens
acaatgtctggaggcgttct

SEQ ID NO: 8762 - DNA, 20 bp, Homo sapiens
ggcgttcttggttgacacag

SEQ ID NO: 8763 - DNA, 20 bp, Homo sapiens
gcgttcttggttgacacagt

SEQ ID NO: 8764 - DNA, 20 bp, Homo sapiens
cgttcttggttgacacagtg

SEQ ID NO: 8765 - DNA, 20 bp, Homo sapiens
ttggttgacacagtggggtg

SEQ ID NO: 8766 - DNA, 20 bp, Homo sapiens
tggttgacacagtggggtga

SEQ ID NO: 8767 - DNA, 20 bp, Homo sapiens
agtggggtgagggctgctac

SEQ ID NO: 8768 - DNA, 20 bp, Homo sapiens
gggctgctactggcagctcg

SEQ ID NO: 8769 - DNA, 20 bp, Homo sapiens
ggctgctactggcagctcgt

SEQ ID NO: 8770 - DNA, 20 bp, Homo sapiens
gctgctactggcagctcgtg

SEQ ID NO: 8771 - DNA, 20 bp, Homo sapiens
gcagctcgtggggagagacc

SEQ ID NO: 8772 - DNA, 20 bp, Homo sapiens
cagctcgtggggagagacca

SEQ ID NO: 8773 - DNA, 20 bp, Homo sapiens
aggatgttaagcagcatccc

SEQ ID NO: 8774 - DNA, 20 bp, Homo sapiens
ggggctgccctgtgtactgt

SEQ ID NO: 8775 - DNA, 20 bp, Homo sapiens
cttaacatcctacagtacac

SEQ ID NO: 8776 - DNA, 20 bp, Homo sapiens
ttaacatcctacagtacaca

SEQ ID NO: 8777 - DNA, 20 bp, Homo sapiens
ctgataattccttgtggtgg

SEQ ID NO: 8778 - DNA, 20 bp, Homo sapiens
gctgataattccttgtggtg

SEQ ID NO: 8779 - DNA, 20 bp, Homo sapiens
acagggcagcccccaccaca

SEQ ID NO: 8780 - DNA, 20 bp, Homo sapiens
agctgataattccttgtggt

SEQ ID NO: 8781 - DNA, 20 bp, Homo sapiens
cagctgataattccttgtgg

SEQ ID NO: 8782 - DNA, 20 bp, Homo sapiens
tttcagctgataattccttg

SEQ ID NO: 8783 - DNA, 20 bp, Homo sapiens
gaccacactatgagtagcaa

SEQ ID NO: 8784 - DNA, 20 bp, Homo sapiens
ggaccacactatgagtagca

SEQ ID NO: 8785 - DNA, 20 bp, Homo sapiens
gacccttgctactcatagtg

SEQ ID NO: 8786 - DNA, 20 bp, Homo sapiens
atgccaatgctgctggtcta

SEQ ID NO: 8787 - DNA, 20 bp, Homo sapiens
ccaggtgatgccaatgctgc

SEQ ID NO: 8788 - DNA, 20 bp, Homo sapiens
ggtccgtagaccagcagcat

SEQ ID NO: 8789 - DNA, 20 bp, Homo sapiens
ccagcagcattggcatcacc

SEQ ID NO: 8790 - DNA, 20 bp, Homo sapiens
cagcagcattggcatcacct

SEQ ID NO: 8791 - DNA, 20 bp, Homo sapiens
agcatttctaacaaggtccc

SEQ ID NO: 8792 - DNA, 20 bp, Homo sapiens
gtctaacagcatttctaaca

SEQ ID NO: 8793 - DNA, 20 bp, Homo sapiens
gctttagtggatgtggggtg

SEQ ID NO: 8794 - DNA, 20 bp, Homo sapiens
ggctttagtggatgtggggt

SEQ ID NO: 8795 - DNA, 20 bp, Homo sapiens
tggctttagtggatgtgggg

SEQ ID NO: 8796 - DNA, 20 bp, Homo sapiens
agctggctttagtggatgtg

SEQ ID NO: 8797 - DNA, 20 bp, Homo sapiens
gagctggctttagtggatgt

SEQ ID NO: 8798 - DNA, 20 bp, Homo sapiens
agagctggctttagtggatg

SEQ ID NO: 8799 - DNA, 20 bp, Homo sapiens
aaatgaagagctggctttag

SEQ ID NO: 8800 - DNA, 20 bp, Homo sapiens
agtttgttgaaatgaagagc

SEQ ID NO: 8801 - DNA, 20 bp, Homo sapiens
aatgtgcactcacatcatcg

SEQ ID NO: 8802 - DNA, 20 bp, Homo sapiens
gaatgtgcactcacatcatc

SEQ ID NO: 8803 - DNA, 20 bp, Homo sapiens
tgaatgtgcactcacatcat

SEQ ID NO: 8804 - DNA, 20 bp, Homo sapiens
gtgcacattcaagtctgaga

SEQ ID NO: 8805 - DNA, 20 bp, Homo sapiens
tgcacattcaagtctgagaa

SEQ ID NO: 8806 - DNA, 20 bp, Homo sapiens
gtctgagaagggcttctttg

SEQ ID NO: 8807 - DNA, 20 bp, Homo sapiens
ccaaagggggatgggcacta

SEQ ID NO: 8808 - DNA, 20 bp, Homo sapiens
cggggccaccaaagggggat

SEQ ID NO: 8809 - DNA, 20 bp, Homo sapiens
ccggggccaccaaaggggga

SEQ ID NO: 8810 - DNA, 20 bp, Homo sapiens
ccttagtgcccatccccctt

SEQ ID NO: 8811 - DNA, 20 bp, Homo sapiens
gtatccggggccaccaaagg

SEQ ID NO: 8812 - DNA, 20 bp, Homo sapiens
tagtgcccatccccctttgg

SEQ ID NO: 8813 - DNA, 20 bp, Homo sapiens
ggtatccggggccaccaaag

SEQ ID NO: 8814 - DNA, 20 bp, Homo sapiens
tggtatccggggccaccaaa

SEQ ID NO: 8815 - DNA, 20 bp, Homo sapiens
ttggtatccggggccaccaa

SEQ ID NO: 8816 - DNA, 20 bp, Homo sapiens
ccatccccctttggtggccc

SEQ ID NO: 8817 - DNA, 20 bp, Homo sapiens
tcacacacccttggtatccg

SEQ ID NO: 8818 - DNA, 20 bp, Homo sapiens
ttcacacacccttggtatcc

SEQ ID NO: 8819 - DNA, 20 bp, Homo sapiens
tttcacacacccttggtatc

SEQ ID NO: 8820 - DNA, 20 bp, Homo sapiens
tttggtggccccggatacca

SEQ ID NO: 8821 - DNA, 20 bp, Homo sapiens
ttggtggccccggataccaa

SEQ ID NO: 8822 - DNA, 20 bp, Homo sapiens
ccacccctttcacacaccct

SEQ ID NO: 8823 - DNA, 20 bp, Homo sapiens
ggataccaagggtgtgtgaa

SEQ ID NO: 8824 - DNA, 20 bp, Homo sapiens
gataccaagggtgtgtgaaa

SEQ ID NO: 8825 - DNA, 20 bp, Homo sapiens
ataccaagggtgtgtgaaag

SEQ ID NO: 8826 - DNA, 20 bp, Homo sapiens
ccaagggtgtgtgaaagggg

SEQ ID NO: 8827 - DNA, 20 bp, Homo sapiens
caagggtgtgtgaaaggggt

SEQ ID NO: 8828 - DNA, 20 bp, Homo sapiens
ggtgtgtgaaaggggtgggt

SEQ ID NO: 8829 - DNA, 20 bp, Homo sapiens
gtgtgtgaaaggggtgggta

SEQ ID NO: 8830 - DNA, 20 bp, Homo sapiens
aaaggggtgggtagggaata

SEQ ID NO: 8831 - DNA, 20 bp, Homo sapiens
aaggggtgggtagggaatat

SEQ ID NO: 8832 - DNA, 20 bp, Homo sapiens
gttattataagcagattggc

SEQ ID NO: 8833 - DNA, 20 bp, Homo sapiens
aagtgttattataagcagat

SEQ ID NO: 8834 - DNA, 20 bp, Homo sapiens
ttataataacacttgtccac

SEQ ID NO: 8835 - DNA, 20 bp, Homo sapiens
tataataacacttgtccaca

SEQ ID NO: 8836 - DNA, 20 bp, Homo sapiens
ataataacacttgtccacag

SEQ ID NO: 8837 - DNA, 20 bp, Homo sapiens
actcggttacaacacccctg

SEQ ID NO: 8838 - DNA, 20 bp, Homo sapiens
ggggtgttgtaaccgagtgc

SEQ ID NO: 8839 - DNA, 20 bp, Homo sapiens
gggtgttgtaaccgagtgct

SEQ ID NO: 8840 - DNA, 20 bp, Homo sapiens
tgtggggaatccccagcact

SEQ ID NO: 8841 - DNA, 20 bp, Homo sapiens
ggtgttgtaaccgagtgctg

SEQ ID NO: 8842 - DNA, 20 bp, Homo sapiens
tagcccatgatggagctgtg

SEQ ID NO: 8843 - DNA, 20 bp, Homo sapiens
gtagcccatgatggagctgt

SEQ ID NO: 8844 - DNA, 20 bp, Homo sapiens
tgtagcccatgatggagctg

SEQ ID NO: 8845 - DNA, 20 bp, Homo sapiens
gattccccacagctccatca

SEQ ID NO: 8846 - DNA, 20 bp, Homo sapiens
attccccacagctccatcat

SEQ ID NO: 8847 - DNA, 20 bp, Homo sapiens
gctgaagttgtagcccatga

SEQ ID NO: 8848 - DNA, 20 bp, Homo sapiens
gggctacaacttcagcttgc

SEQ ID NO: 8849 - DNA, 20 bp, Homo sapiens
ggctacaacttcagcttgct

SEQ ID NO: 8850 - DNA, 20 bp, Homo sapiens
ttcagcttgctgggtctgct

SEQ ID NO: 8851 - DNA, 20 bp, Homo sapiens
gatcatctacattgtgctgc

SEQ ID NO: 8852 - DNA, 20 bp, Homo sapiens
ctgctggtgcttgataccgt

SEQ ID NO: 8853 - DNA, 20 bp, Homo sapiens
catgccattgccggctccga

SEQ ID NO: 8854 - DNA, 20 bp, Homo sapiens
gtgcttgataccgtcggagc

SEQ ID NO: 8855 - DNA, 20 bp, Homo sapiens
gataccgtcggagccggcaa

SEQ ID NO: 8856 - DNA, 20 bp, Homo sapiens
agtgacccacatgccattgc

SEQ ID NO: 8857 - DNA, 20 bp, Homo sapiens
tcggagccggcaatggcatg

SEQ ID NO: 8858 - DNA, 20 bp, Homo sapiens
cggagccggcaatggcatgt

SEQ ID NO: 8859 - DNA, 20 bp, Homo sapiens
ggcaatggcatgtgggtcac

SEQ ID NO: 8860 - DNA, 20 bp, Homo sapiens
gcaatggcatgtgggtcact

SEQ ID NO: 8861 - DNA, 20 bp, Homo sapiens
gggagtgttaaggggatggg

SEQ ID NO: 8862 - DNA, 20 bp, Homo sapiens
ggggagtgttaaggggatgg

SEQ ID NO: 8863 - DNA, 20 bp, Homo sapiens
aggggagtgttaaggggatg

SEQ ID NO: 8864 - DNA, 20 bp, Homo sapiens
gaggggagtgttaaggggat

SEQ ID NO: 8865 - DNA, 20 bp, Homo sapiens
ggaggggagtgttaagggga

SEQ ID NO: 8866 - DNA, 20 bp, Homo sapiens
agttggaggggagtgttaag

SEQ ID NO: 8867 - DNA, 20 bp, Homo sapiens
gagttggaggggagtgttaa

SEQ ID NO: 8868 - DNA, 20 bp, Homo sapiens
tgagttggaggggagtgtta

SEQ ID NO: 8869 - DNA, 20 bp, Homo sapiens
catttcttcctgagttggag

SEQ ID NO: 8870 - DNA, 20 bp, Homo sapiens
acatttcttcctgagttgga

SEQ ID NO: 8871 - DNA, 20 bp, Homo sapiens
cacatttcttcctgagttgg

SEQ ID NO: 8872 - DNA, 20 bp, Homo sapiens
ttaacactcccctccaactc

SEQ ID NO: 8873 - DNA, 20 bp, Homo sapiens
gcacacatttcttcctgagt

SEQ ID NO: 8874 - DNA, 20 bp, Homo sapiens
atgtgtgcagagtccttagc

SEQ ID NO: 8875 - DNA, 20 bp, Homo sapiens
tgtgtgcagagtccttagct

SEQ ID NO: 8876 - DNA, 20 bp, Homo sapiens
gtgtgcagagtccttagctg

SEQ ID NO: 8877 - DNA, 20 bp, Homo sapiens
gagtgcacacgccccagcta

SEQ ID NO: 8878 - DNA, 20 bp, Homo sapiens
ttagctggggcgtgtgcact

SEQ ID NO: 8879 - DNA, 20 bp, Homo sapiens
tagctggggcgtgtgcactc

SEQ ID NO: 8880 - DNA, 20 bp, Homo sapiens
agctggggcgtgtgcactcg

SEQ ID NO: 8881 - DNA, 20 bp, Homo sapiens
gggcgtgtgcactcggggcc

SEQ ID NO: 8882 - DNA, 20 bp, Homo sapiens
accgaagcctactgagcacc

SEQ ID NO: 8883 - DNA, 20 bp, Homo sapiens
ctcggggccaggtgctcagt

SEQ ID NO: 8884 - DNA, 20 bp, Homo sapiens
gccaggtgctcagtaggctt

SEQ ID NO: 8885 - DNA, 20 bp, Homo sapiens
aggcttcggtgaatatttgt

SEQ ID NO: 8886 - DNA, 20 bp, Homo sapiens
aatccatccaaggtaggggc

SEQ ID NO: 8887 - DNA, 20 bp, Homo sapiens
attctgtccagcccctacct

SEQ ID NO: 8888 - DNA, 20 bp, Homo sapiens
gataaatccatccaaggtag

SEQ ID NO: 8889 - DNA, 20 bp, Homo sapiens
tgataaatccatccaaggta

SEQ ID NO: 8890 - DNA, 20 bp, Homo sapiens
gtgataaatccatccaaggt

SEQ ID NO: 8891 - DNA, 20 bp, Homo sapiens
tgtccagcccctaccttgga

SEQ ID NO: 8892 - DNA, 20 bp, Homo sapiens
agaggtgataaatccatcca

SEQ ID NO: 8893 - DNA, 20 bp, Homo sapiens
gatggatttatcacctctcc

SEQ ID NO: 8894 - DNA, 20 bp, Homo sapiens
aaagaagaggtggcctggag

SEQ ID NO: 8895 - DNA, 20 bp, Homo sapiens
tttggaaagaagaggtggcc

SEQ ID NO: 8896 - DNA, 20 bp, Homo sapiens
ccctatttggaaagaagagg

SEQ ID NO: 8897 - DNA, 20 bp, Homo sapiens
tggccctatttggaaagaag

SEQ ID NO: 8898 - DNA, 20 bp, Homo sapiens
gccacctcttctttccaaat

SEQ ID NO: 8899 - DNA, 20 bp, Homo sapiens
ccacctcttctttccaaata

SEQ ID NO: 8900 - DNA, 20 bp, Homo sapiens
tatacctaggtggccctatt

SEQ ID NO: 8901 - DNA, 20 bp, Homo sapiens
ctttccaaatagggccacct

SEQ ID NO: 8902 - DNA, 20 bp, Homo sapiens
gtctttggtctatacctagg

SEQ ID NO: 8903 - DNA, 20 bp, Homo sapiens
cgtgtctttggtctatacct

SEQ ID NO: 8904 - DNA, 20 bp, Homo sapiens
cacaaaagatttcgtgtctt

SEQ ID NO: 8905 - DNA, 20 bp, Homo sapiens
ttgacctgctctgtgtttgt

SEQ ID NO: 8906 - DNA, 20 bp, Homo sapiens
tttgacctgctctgtgtttg

SEQ ID NO: 8907 - DNA, 20 bp, Homo sapiens
tgatcccacaaacacagagc

SEQ ID NO: 8908 - DNA, 20 bp, Homo sapiens
aaacacagagcaggtcaaat

SEQ ID NO: 8909 - DNA, 20 bp, Homo sapiens
accacagtctcaattggctt

SEQ ID NO: 8910 - DNA, 20 bp, Homo sapiens
aaccacagtctcaattggct

SEQ ID NO: 8911 - DNA, 20 bp, Homo sapiens
acctgaaccacagtctcaat

SEQ ID NO: 8912 - DNA, 20 bp, Homo sapiens
gcccaagccaattgagactg

SEQ ID NO: 8913 - DNA, 20 bp, Homo sapiens
gccaattgagactgtggttc

SEQ ID NO: 8914 - DNA, 20 bp, Homo sapiens
cgtgatgcagagctttgctg

SEQ ID NO: 8915 - DNA, 20 bp, Homo sapiens
atgcccagctagtacgcagt

SEQ ID NO: 8916 - DNA, 20 bp, Homo sapiens
catgcccagctagtacgcag

SEQ ID NO: 8917 - DNA, 20 bp, Homo sapiens
tgctcccactgcgtactagc

SEQ ID NO: 8918 - DNA, 20 bp, Homo sapiens
gctcccactgcgtactagct

SEQ ID NO: 8919 - DNA, 20 bp, Homo sapiens
ctgcgtactagctgggcatg

SEQ ID NO: 8920 - DNA, 20 bp, Homo sapiens
ggggcgactgaggctgagaa

SEQ ID NO: 8921 - DNA, 20 bp, Homo sapiens
catttacaatggggcgactg

SEQ ID NO: 8922 - DNA, 20 bp, Homo sapiens
cattatctccatttacaatg

SEQ ID NO: 8923 - DNA, 20 bp, Homo sapiens
tcattatctccatttacaat

SEQ ID NO: 8924 - DNA, 20 bp, Homo sapiens
atcattatctccatttacaa

SEQ ID NO: 8925 - DNA, 20 bp, Homo sapiens
ctcagtcgccccattgtaaa

SEQ ID NO: 8926 - DNA, 20 bp, Homo sapiens
atgatactatctcccctcac

SEQ ID NO: 8927 - DNA, 20 bp, Homo sapiens
catcccaacagtcctgtgag

SEQ ID NO: 8928 - DNA, 20 bp, Homo sapiens
gcatcccaacagtcctgtga

SEQ ID NO: 8929 - DNA, 20 bp, Homo sapiens
agcatcccaacagtcctgtg

SEQ ID NO: 8930 - DNA, 20 bp, Homo sapiens
atctcccctcacaggactgt

SEQ ID NO: 8931 - DNA, 20 bp, Homo sapiens
tctcccctcacaggactgtt

SEQ ID NO: 8932 - DNA, 20 bp, Homo sapiens
caggactgttgggatgctac

SEQ ID NO: 8933 - DNA, 20 bp, Homo sapiens
tggatttaataagctaatgc

SEQ ID NO: 8934 - DNA, 20 bp, Homo sapiens
ggatttaataagctaatgca

SEQ ID NO: 8935 - DNA, 20 bp, Homo sapiens
cctctctgggcctcagggat

SEQ ID NO: 8936 - DNA, 20 bp, Homo sapiens
ctaagcacaacccatccctg

SEQ ID NO: 8937 - DNA, 20 bp, Homo sapiens
ccctctctgggcctcaggga

SEQ ID NO: 8938 - DNA, 20 bp, Homo sapiens
ccacccctctctgggcctca

SEQ ID NO: 8939 - DNA, 20 bp, Homo sapiens
cccacccctctctgggcctc

SEQ ID NO: 8940 - DNA, 20 bp, Homo sapiens
cccatccctgaggcccagag

SEQ ID NO: 8941 - DNA, 20 bp, Homo sapiens
ccatccctgaggcccagaga

SEQ ID NO: 8942 - DNA, 20 bp, Homo sapiens
catccctgaggcccagagag

SEQ ID NO: 8943 - DNA, 20 bp, Homo sapiens
gccaaggcccacccctctct

SEQ ID NO: 8944 - DNA, 20 bp, Homo sapiens
agccaaggcccacccctctc

SEQ ID NO: 8945 - DNA, 20 bp, Homo sapiens
ccctgaggcccagagagggg

SEQ ID NO: 8946 - DNA, 20 bp, Homo sapiens
cctgaggcccagagaggggt

SEQ ID NO: 8947 - DNA, 20 bp, Homo sapiens
gcccagagaggggtgggcct

SEQ ID NO: 8948 - DNA, 20 bp, Homo sapiens
agaggggtgggccttggctg

SEQ ID NO: 8949 - DNA, 20 bp, Homo sapiens
tcgcagtgagacctcagcca

SEQ ID NO: 8950 - DNA, 20 bp, Homo sapiens
ttggctgaggtctcactgcg

SEQ ID NO: 8951 - DNA, 20 bp, Homo sapiens
gctgaggtctcactgcgagg

SEQ ID NO: 8952 - DNA, 20 bp, Homo sapiens
ctgaggtctcactgcgaggt

SEQ ID NO: 8953 - DNA, 20 bp, Homo sapiens
ctcactgcgaggtgggaatg

SEQ ID NO: 8954 - DNA, 20 bp, Homo sapiens
tcactgcgaggtgggaatgt

SEQ ID NO: 8955 - DNA, 20 bp, Homo sapiens
aggacctacctctggtctgg

SEQ ID NO: 8956 - DNA, 20 bp, Homo sapiens
aatgtgggcctccagaccag

SEQ ID NO: 8957 - DNA, 20 bp, Homo sapiens
cacaggacctacctctggtc

SEQ ID NO: 8958 - DNA, 20 bp, Homo sapiens
tgggcctccagaccagaggt

SEQ ID NO: 8959 - DNA, 20 bp, Homo sapiens
ggggccacaggacctacctc

SEQ ID NO: 8960 - DNA, 20 bp, Homo sapiens
cagaccagaggtaggtcctg

SEQ ID NO: 8961 - DNA, 20 bp, Homo sapiens
gtccactgtctaggggccac

SEQ ID NO: 8962 - DNA, 20 bp, Homo sapiens
cattgctgtccactgtctag

SEQ ID NO: 8963 - DNA, 20 bp, Homo sapiens
ccattgctgtccactgtcta

SEQ ID NO: 8964 - DNA, 20 bp, Homo sapiens
gtcctgtggcccctagacag

SEQ ID NO: 8965 - DNA, 20 bp, Homo sapiens
accattgctgtccactgtct

SEQ ID NO: 8966 - DNA, 20 bp, Homo sapiens
ccctagacagtggacagcaa

SEQ ID NO: 8967 - DNA, 20 bp, Homo sapiens
ggaagtaatggctagggctc

SEQ ID NO: 8968 - DNA, 20 bp, Homo sapiens
catccaggaagtaatggcta

SEQ ID NO: 8969 - DNA, 20 bp, Homo sapiens
acatccaggaagtaatggct

SEQ ID NO: 8970 - DNA, 20 bp, Homo sapiens
acacaacatccaggaagtaa

SEQ ID NO: 8971 - DNA, 20 bp, Homo sapiens
gagccctagccattacttcc

SEQ ID NO: 8972 - DNA, 20 bp, Homo sapiens
tataaaatgaaaaagtgaat

SEQ ID NO: 8973 - DNA, 20 bp, Homo sapiens
ataaaatgaaaaagtgaatt

SEQ ID NO: 8974 - DNA, 20 bp, Homo sapiens
aagtgaattgggcacgatac

SEQ ID NO: 8975 - DNA, 20 bp, Homo sapiens
agtgaattgggcacgataca

SEQ ID NO: 8976 - DNA, 20 bp, Homo sapiens
atagatttttagagatgaac

SEQ ID NO: 8977 - DNA, 20 bp, Homo sapiens
attgactgctttaaaagtgt

SEQ ID NO: 8978 - DNA, 20 bp, Homo sapiens
ttgactgctttaaaagtgtt

SEQ ID NO: 8979 - DNA, 20 bp, Homo sapiens
caaggagataatgcatataa

SEQ ID NO: 8980 - DNA, 20 bp, Homo sapiens
taggcggttgtgagaattca

SEQ ID NO: 8981 - DNA, 20 bp, Homo sapiens
tctgagaatacctcagtagg

SEQ ID NO: 8982 - DNA, 20 bp, Homo sapiens
attctcacaaccgcctactg

SEQ ID NO: 8983 - DNA, 20 bp, Homo sapiens
gagtctgagaatacctcagt

SEQ ID NO: 8984 - DNA, 20 bp, Homo sapiens
taagagaagttatctgccca

SEQ ID NO: 8985 - DNA, 20 bp, Homo sapiens
ggttccagccgagtgacctt

SEQ ID NO: 8986 - DNA, 20 bp, Homo sapiens
aggttccagccgagtgacct

SEQ ID NO: 8987 - DNA, 20 bp, Homo sapiens
gttatctgcccaaggtcact

SEQ ID NO: 8988 - DNA, 20 bp, Homo sapiens
tctgcccaaggtcactcggc

SEQ ID NO: 8989 - DNA, 20 bp, Homo sapiens
aaggtcactcggctggaacc

SEQ ID NO: 8990 - DNA, 20 bp, Homo sapiens
cttcagccatttttacagcc

SEQ ID NO: 8991 - DNA, 20 bp, Homo sapiens
ctggaacctggctgtaaaaa

SEQ ID NO: 8992 - DNA, 20 bp, Homo sapiens
gctgtaaaaatggctgaagc

SEQ ID NO: 8993 - DNA, 20 bp, Homo sapiens
aatggctgaagcaggtgatg

SEQ ID NO: 8994 - DNA, 20 bp, Homo sapiens
tgatgaggagctgatgcgtt

SEQ ID NO: 8995 - DNA, 20 bp, Homo sapiens
gacgtgtctcagagaaatca

SEQ ID NO: 8996 - DNA, 20 bp, Homo sapiens
gtgtctcagagaaatcatgg

SEQ ID NO: 8997 - DNA, 20 bp, Homo sapiens
gagaaatcatggaggcgctg

SEQ ID NO: 8998 - DNA, 20 bp, Homo sapiens
ggaggcgctgcggttcctac

SEQ ID NO: 8999 - DNA, 20 bp, Homo sapiens
gaaggcatccaagaaccggt

SEQ ID NO: 9000 - DNA, 20 bp, Homo sapiens
ctgcggttcctaccggttct

SEQ ID NO: 9001 - DNA, 20 bp, Homo sapiens
tgtagaaggcatccaagaac

SEQ ID NO: 9002 - DNA, 20 bp, Homo sapiens
gctatggttgtctctgtaga

SEQ ID NO: 9003 - DNA, 20 bp, Homo sapiens
atccctataatttggggcta

SEQ ID NO: 9004 - DNA, 20 bp, Homo sapiens
tatgtgatccctataatttg

SEQ ID NO: 9005 - DNA, 20 bp, Homo sapiens
atatgtgatccctataattt

SEQ ID NO: 9006 - DNA, 20 bp, Homo sapiens
caaccatagccccaaattat

SEQ ID NO: 9007 - DNA, 20 bp, Homo sapiens
gatatgtgatccctataatt

SEQ ID NO: 9008 - DNA, 20 bp, Homo sapiens
aaccatagccccaaattata

SEQ ID NO: 9009 - DNA, 20 bp, Homo sapiens
ttatagggatcacatatcag

SEQ ID NO: 9010 - DNA, 20 bp, Homo sapiens
tatagggatcacatatcagt

SEQ ID NO: 9011 - DNA, 20 bp, Homo sapiens
gtgggtgagacatccttgct

SEQ ID NO: 9012 - DNA, 20 bp, Homo sapiens
tgggtgagacatccttgctt

SEQ ID NO: 9013 - DNA, 20 bp, Homo sapiens
tcccctcctcatcccaagca

SEQ ID NO: 9014 - DNA, 20 bp, Homo sapiens
agacatccttgcttgggatg

SEQ ID NO: 9015 - DNA, 20 bp, Homo sapiens
catccttgcttgggatgagg

SEQ ID NO: 9016 - DNA, 20 bp, Homo sapiens
atccttgcttgggatgagga

SEQ ID NO: 9017 - DNA, 20 bp, Homo sapiens
tccttgcttgggatgaggag

SEQ ID NO: 9018 - DNA, 20 bp, Homo sapiens
gggatgagctgtgtgaagca

SEQ ID NO: 9019 - DNA, 20 bp, Homo sapiens
gaagcaaggcgcctctgtga

SEQ ID NO: 9020 - DNA, 20 bp, Homo sapiens
atcactggaacccatcacag

SEQ ID NO: 9021 - DNA, 20 bp, Homo sapiens
aagcaaggcgcctctgtgat

SEQ ID NO: 9022 - DNA, 20 bp, Homo sapiens
gacagtggcagacacatcac

SEQ ID NO: 9023 - DNA, 20 bp, Homo sapiens
ttgcacagttattaagacag

SEQ ID NO: 9024 - DNA, 20 bp, Homo sapiens
ctcaggcccagagacaggaa

SEQ ID NO: 9025 - DNA, 20 bp, Homo sapiens
agcagaacctttcctgtctc

SEQ ID NO: 9026 - DNA, 20 bp, Homo sapiens
gcagaacctttcctgtctct

SEQ ID NO: 9027 - DNA, 20 bp, Homo sapiens
gaactctcaggcccagagac

SEQ ID NO: 9028 - DNA, 20 bp, Homo sapiens
tctttcagaggggaactctc

SEQ ID NO: 9029 - DNA, 20 bp, Homo sapiens
caagtcctcatctttcagag

SEQ ID NO: 9030 - DNA, 20 bp, Homo sapiens
tcaagtcctcatctttcaga

SEQ ID NO: 9031 - DNA, 20 bp, Homo sapiens
gtcaagtcctcatctttcag

SEQ ID NO: 9032 - DNA, 20 bp, Homo sapiens
gagttcccctctgaaagatg

SEQ ID NO: 9033 - DNA, 20 bp, Homo sapiens
gatgaggacttgacctagca

SEQ ID NO: 9034 - DNA, 20 bp, Homo sapiens
catgtgagtaggaccttgct

SEQ ID NO: 9035 - DNA, 20 bp, Homo sapiens
ttctctacaggcatgtgagt

SEQ ID NO: 9036 - DNA, 20 bp, Homo sapiens
ttcccctgcctgttctctac

SEQ ID NO: 9037 - DNA, 20 bp, Homo sapiens
ctcacatgcctgtagagaac

SEQ ID NO: 9038 - DNA, 20 bp, Homo sapiens
catgcctgtagagaacaggc

SEQ ID NO: 9039 - DNA, 20 bp, Homo sapiens
atgcctgtagagaacaggca

SEQ ID NO: 9040 - DNA, 20 bp, Homo sapiens
tgcctgtagagaacaggcag

SEQ ID NO: 9041 - DNA, 20 bp, Homo sapiens
aaaaaaaaaaaagccagtga

SEQ ID NO: 9042 - DNA, 20 bp, Homo sapiens
gaagagctcccttccttcac

SEQ ID NO: 9043 - DNA, 20 bp, Homo sapiens
aaaaaaaagccagtgaagga

SEQ ID NO: 9044 - DNA, 20 bp, Homo sapiens
aaaaaaagccagtgaaggaa

SEQ ID NO: 9045 - DNA, 20 bp, Homo sapiens
ggtccctgcactgtgatgat

SEQ ID NO: 9046 - DNA, 20 bp, Homo sapiens
gggtccctgcactgtgatga

SEQ ID NO: 9047 - DNA, 20 bp, Homo sapiens
tgcacccatcatcacagtgc

SEQ ID NO: 9048 - DNA, 20 bp, Homo sapiens
gcacccatcatcacagtgca

SEQ ID NO: 9049 - DNA, 20 bp, Homo sapiens
tcatcacagtgcagggaccc

SEQ ID NO: 9050 - DNA, 20 bp, Homo sapiens
gatctggcaacactgagcct

SEQ ID NO: 9051 - DNA, 20 bp, Homo sapiens
ggatctggcaacactgagcc

SEQ ID NO: 9052 - DNA, 20 bp, Homo sapiens
tcttgagaagtcattggatc

SEQ ID NO: 9053 - DNA, 20 bp, Homo sapiens
ttgagctcttgagaagtcat

SEQ ID NO: 9054 - DNA, 20 bp, Homo sapiens
gcatgtgctctcccaagtac

SEQ ID NO: 9055 - DNA, 20 bp, Homo sapiens
tgaattttctgccagtactt

SEQ ID NO: 9056 - DNA, 20 bp, Homo sapiens
ttgaattttctgccagtact

SEQ ID NO: 9057 - DNA, 20 bp, Homo sapiens
agattgttagtaacactgtg

SEQ ID NO: 9058 - DNA, 20 bp, Homo sapiens
gtgtggctaaattctgcttg

SEQ ID NO: 9059 - DNA, 20 bp, Homo sapiens
tgtggctaaattctgcttgt

SEQ ID NO: 9060 - DNA, 20 bp, Homo sapiens
aatcacagaattgggaatct

SEQ ID NO: 9061 - DNA, 20 bp, Homo sapiens
aaccacagaatcacagaatt

SEQ ID NO: 9062 - DNA, 20 bp, Homo sapiens
gaaccacagaatcacagaat

SEQ ID NO: 9063 - DNA, 20 bp, Homo sapiens
ttcccaattctgtgattctg

SEQ ID NO: 9064 - DNA, 20 bp, Homo sapiens
tctgtgattctgtggttctc

SEQ ID NO: 9065 - DNA, 20 bp, Homo sapiens
ctgtggttctctggaagcat

SEQ ID NO: 9066 - DNA, 20 bp, Homo sapiens
tccaagtgatgcaggtgctg

SEQ ID NO: 9067 - DNA, 20 bp, Homo sapiens
aacaagtttccaagtgatgc

SEQ ID NO: 9068 - DNA, 20 bp, Homo sapiens
tccacagcacctgcatcact

SEQ ID NO: 9069 - DNA, 20 bp, Homo sapiens
agaaatgcaagccctaccta

SEQ ID NO: 9070 - DNA, 20 bp, Homo sapiens
ctggggtggggccgtaggta

SEQ ID NO: 9071 - DNA, 20 bp, Homo sapiens
tctggggtggggccgtaggt

SEQ ID NO: 9072 - DNA, 20 bp, Homo sapiens
taggtctggggtggggccgt

SEQ ID NO: 9073 - DNA, 20 bp, Homo sapiens
aactgggtaggtctggggtg

SEQ ID NO: 9074 - DNA, 20 bp, Homo sapiens
taactgggtaggtctggggt

SEQ ID NO: 9075 - DNA, 20 bp, Homo sapiens
ctaactgggtaggtctgggg

SEQ ID NO: 9076 - DNA, 20 bp, Homo sapiens
tttctaactgggtaggtctg

SEQ ID NO: 9077 - DNA, 20 bp, Homo sapiens
atttctaactgggtaggtct

SEQ ID NO: 9078 - DNA, 20 bp, Homo sapiens
gatttctaactgggtaggtc

SEQ ID NO: 9079 - DNA, 20 bp, Homo sapiens
ccccagatttctaactgggt

SEQ ID NO: 9080 - DNA, 20 bp, Homo sapiens
ccacccccagatttctaact

SEQ ID NO: 9081 - DNA, 20 bp, Homo sapiens
cccacccccagatttctaac

SEQ ID NO: 9082 - DNA, 20 bp, Homo sapiens
gacctacccagttagaaatc

SEQ ID NO: 9083 - DNA, 20 bp, Homo sapiens
acctacccagttagaaatct

SEQ ID NO: 9084 - DNA, 20 bp, Homo sapiens
cctacccagttagaaatctg

SEQ ID NO: 9085 - DNA, 20 bp, Homo sapiens
ctacccagttagaaatctgg

SEQ ID NO: 9086 - DNA, 20 bp, Homo sapiens
cccagttagaaatctggggg

SEQ ID NO: 9087 - DNA, 20 bp, Homo sapiens
ccagttagaaatctgggggt

SEQ ID NO: 9088 - DNA, 20 bp, Homo sapiens
ttgttcaaacatggactgat

SEQ ID NO: 9089 - DNA, 20 bp, Homo sapiens
ttgtggggcttgttcaaaca

SEQ ID NO: 9090 - DNA, 20 bp, Homo sapiens
cttgcaagagaacacttgtg

SEQ ID NO: 9091 - DNA, 20 bp, Homo sapiens
gcttgcaagagaacacttgt

SEQ ID NO: 9092 - DNA, 20 bp, Homo sapiens
agcttgcaagagaacacttg

SEQ ID NO: 9093 - DNA, 20 bp, Homo sapiens
cttttttggctataggtcag

SEQ ID NO: 9094 - DNA, 20 bp, Homo sapiens
gctttttcttttttggctat

SEQ ID NO: 9095 - DNA, 20 bp, Homo sapiens
ctgattggctttttcttttt

SEQ ID NO: 9096 - DNA, 20 bp, Homo sapiens
aaaaagaaaaagccaatcag

SEQ ID NO: 9097 - DNA, 20 bp, Homo sapiens
tttaccagaaaaccactgat

SEQ ID NO: 9098 - DNA, 20 bp, Homo sapiens
aaagccaatcagtggttttc

SEQ ID NO: 9099 - DNA, 20 bp, Homo sapiens
aatcagtggttttctggtaa

SEQ ID NO: 9100 - DNA, 20 bp, Homo sapiens
aaaggattaacttaacaaac

SEQ ID NO: 9101 - DNA, 20 bp, Homo sapiens
caatcaaggctttattttct

SEQ ID NO: 9102 - DNA, 20 bp, Homo sapiens
caagaaaataaagccttgat

SEQ ID NO: 9103 - DNA, 20 bp, Homo sapiens
attgcaagtgctaccaatca

SEQ ID NO: 9104 - DNA, 20 bp, Homo sapiens
ggtagcacttgcaatttcta

SEQ ID NO: 9105 - DNA, 20 bp, Homo sapiens
cagcttgaactcagtcatgc

SEQ ID NO: 9106 - DNA, 20 bp, Homo sapiens
acagcttgaactcagtcatg

SEQ ID NO: 9107 - DNA, 20 bp, Homo sapiens
tgactgagttcaagctgtca

SEQ ID NO: 9108 - DNA, 20 bp, Homo sapiens
caaggagacatcactataca

SEQ ID NO: 9109 - DNA, 20 bp, Homo sapiens
gacatcactatacatggact

SEQ ID NO: 9110 - DNA, 20 bp, Homo sapiens
acatcactatacatggactt

SEQ ID NO: 9111 - DNA, 20 bp, Homo sapiens
ccagttcccataggctcagt

SEQ ID NO: 9112 - DNA, 20 bp, Homo sapiens
gccagttcccataggctcag

SEQ ID NO: 9113 - DNA, 20 bp, Homo sapiens
caatcagcccactgagccta

SEQ ID NO: 9114 - DNA, 20 bp, Homo sapiens
aatcagcccactgagcctat

SEQ ID NO: 9115 - DNA, 20 bp, Homo sapiens
gtgctggagccagttcccat

SEQ ID NO: 9116 - DNA, 20 bp, Homo sapiens
cccactgagcctatgggaac

SEQ ID NO: 9117 - DNA, 20 bp, Homo sapiens
gttgacttgcagggatgtgc

SEQ ID NO: 9118 - DNA, 20 bp, Homo sapiens
ctgatgagagttgacttgca

SEQ ID NO: 9119 - DNA, 20 bp, Homo sapiens
cctgatgagagttgacttgc

SEQ ID NO: 9120 - DNA, 20 bp, Homo sapiens
cctgcaagtcaactctcatc

SEQ ID NO: 9121 - DNA, 20 bp, Homo sapiens
ctgcaagtcaactctcatca

SEQ ID NO: 9122 - DNA, 20 bp, Homo sapiens
tcatcagggtgagtgagttg

SEQ ID NO: 9123 - DNA, 20 bp, Homo sapiens
gcaagaggataactgcttct

SEQ ID NO: 9124 - DNA, 20 bp, Homo sapiens
ctgggtcctgcaaaggcaag

SEQ ID NO: 9125 - DNA, 20 bp, Homo sapiens
agttatcctcttgcctttgc

SEQ ID NO: 9126 - DNA, 20 bp, Homo sapiens
cctttgcctgggtcctgcaa

SEQ ID NO: 9127 - DNA, 20 bp, Homo sapiens
ctcttgcctttgcaggaccc

SEQ ID NO: 9128 - DNA, 20 bp, Homo sapiens
cctttgcaggacccaggcaa

SEQ ID NO: 9129 - DNA, 20 bp, Homo sapiens
ctatgcccttccctttgcct

SEQ ID NO: 9130 - DNA, 20 bp, Homo sapiens
ctttgcaggacccaggcaaa

SEQ ID NO: 9131 - DNA, 20 bp, Homo sapiens
actatgcccttccctttgcc

SEQ ID NO: 9132 - DNA, 20 bp, Homo sapiens
gcaggacccaggcaaaggga

SEQ ID NO: 9133 - DNA, 20 bp, Homo sapiens
caggacccaggcaaagggaa

SEQ ID NO: 9134 - DNA, 20 bp, Homo sapiens
gacagtgatgatctctcttc

SEQ ID NO: 9135 - DNA, 20 bp, Homo sapiens
ctcagcaaaccaaagacttc

SEQ ID NO: 9136 - DNA, 20 bp, Homo sapiens
atctctcttccggaagtctt

SEQ ID NO: 9137 - DNA, 20 bp, Homo sapiens
tttggtttgctgagagtaaa

SEQ ID NO: 9138 - DNA, 20 bp, Homo sapiens
tttgctgagagtaaaaggcg

SEQ ID NO: 9139 - DNA, 20 bp, Homo sapiens
ttgctgagagtaaaaggcgt

SEQ ID NO: 9140 - DNA, 20 bp, Homo sapiens
aaaggcgtgggcttcaccag

SEQ ID NO: 9141 - DNA, 20 bp, Homo sapiens
tgcatgactggcttcaccac

SEQ ID NO: 9142 - DNA, 20 bp, Homo sapiens
caggactaaggctgcatgac

SEQ ID NO: 9143 - DNA, 20 bp, Homo sapiens
cagtcatgcagccttagtcc

SEQ ID NO: 9144 - DNA, 20 bp, Homo sapiens
gagtttcagtaccaggacta

SEQ ID NO: 9145 - DNA, 20 bp, Homo sapiens
atttagagagtttcagtacc

SEQ ID NO: 9146 - DNA, 20 bp, Homo sapiens
tcagttttctatctgtaaaa

SEQ ID NO: 9147 - DNA, 20 bp, Homo sapiens
cagttttctatctgtaaaat

SEQ ID NO: 9148 - DNA, 20 bp, Homo sapiens
gcacagcaaccctgtgacat

SEQ ID NO: 9149 - DNA, 20 bp, Homo sapiens
gaaaataagacctatgtcac

SEQ ID NO: 9150 - DNA, 20 bp, Homo sapiens
aaaataagacctatgtcaca

SEQ ID NO: 9151 - DNA, 20 bp, Homo sapiens
atcagtcatcataaagaacg

SEQ ID NO: 9152 - DNA, 20 bp, Homo sapiens
catcagtcatcataaagaac

SEQ ID NO: 9153 - DNA, 20 bp, Homo sapiens
gcatcagtcatcataaagaa

SEQ ID NO: 9154 - DNA, 20 bp, Homo sapiens
actgatgctgcatccgtatg

SEQ ID NO: 9155 - DNA, 20 bp, Homo sapiens
tacatagagatgtcctcata

SEQ ID NO: 9156 - DNA, 20 bp, Homo sapiens
atgaggacatctctatgtaa

SEQ ID NO: 9157 - DNA, 20 bp, Homo sapiens
atctctatgtaatggaaaga

SEQ ID NO: 9158 - DNA, 20 bp, Homo sapiens
tgtaatggaaagatggagag

SEQ ID NO: 9159 - DNA, 20 bp, Homo sapiens
cgcaaagtcacaacacttaa

SEQ ID NO: 9160 - DNA, 20 bp, Homo sapiens
gcaaagtcacaacacttaat

SEQ ID NO: 9161 - DNA, 20 bp, Homo sapiens
acaacacttaatgggaactg

SEQ ID NO: 9162 - DNA, 20 bp, Homo sapiens
ggaactgtggattagctact

SEQ ID NO: 9163 - DNA, 20 bp, Homo sapiens
actgtggattagctacttgg

SEQ ID NO: 9164 - DNA, 20 bp, Homo sapiens
gattagctacttggtggcat

SEQ ID NO: 9165 - DNA, 20 bp, Homo sapiens
attagctacttggtggcatt

SEQ ID NO: 9166 - DNA, 20 bp, Homo sapiens
aaattgggaaatattgtttg

SEQ ID NO: 9167 - DNA, 20 bp, Homo sapiens
gctcatctgaataggaaatt

SEQ ID NO: 9168 - DNA, 20 bp, Homo sapiens
tgctcatctgaataggaaat

SEQ ID NO: 9169 - DNA, 20 bp, Homo sapiens
tcacatatgctcatctgaat

SEQ ID NO: 9170 - DNA, 20 bp, Homo sapiens
cagatgctgtgatcagaacc

SEQ ID NO: 9171 - DNA, 20 bp, Homo sapiens
tgctgtgatcagaaccagga

SEQ ID NO: 9172 - DNA, 20 bp, Homo sapiens
ttgtgggaaatgctccatcc

SEQ ID NO: 9173 - DNA, 20 bp, Homo sapiens
ttaaaaatcccacagtttgt

SEQ ID NO: 9174 - DNA, 20 bp, Homo sapiens
cttaaaaatcccacagtttg

SEQ ID NO: 9175 - DNA, 20 bp, Homo sapiens
ggagcatttcccacaaactg

SEQ ID NO: 9176 - DNA, 20 bp, Homo sapiens
gagcatttcccacaaactgt

SEQ ID NO: 9177 - DNA, 20 bp, Homo sapiens
actgtgggatttttaagtaa

SEQ ID NO: 9178 - DNA, 20 bp, Homo sapiens
ctgtgggatttttaagtaat

SEQ ID NO: 9179 - DNA, 20 bp, Homo sapiens
gggatttttaagtaatggga

SEQ ID NO: 9180 - DNA, 20 bp, Homo sapiens
aatgggaaggcacactgaaa

SEQ ID NO: 9181 - DNA, 20 bp, Homo sapiens
tttctccctgacgtaatcaa

SEQ ID NO: 9182 - DNA, 20 bp, Homo sapiens
ctcagtcctttgattacgtc

SEQ ID NO: 9183 - DNA, 20 bp, Homo sapiens
tcagtcctttgattacgtca

SEQ ID NO: 9184 - DNA, 20 bp, Homo sapiens
gagaaaagaaagtccccact

SEQ ID NO: 9185 - DNA, 20 bp, Homo sapiens
agagattctcaggccaagtg

SEQ ID NO: 9186 - DNA, 20 bp, Homo sapiens
cagagattctcaggccaagt

SEQ ID NO: 9187 - DNA, 20 bp, Homo sapiens
gcagagattctcaggccaag

SEQ ID NO: 9188 - DNA, 20 bp, Homo sapiens
agaagggtgcagagattctc

SEQ ID NO: 9189 - DNA, 20 bp, Homo sapiens
gtggttaacaagagctagaa

SEQ ID NO: 9190 - DNA, 20 bp, Homo sapiens
agtggttaacaagagctaga

SEQ ID NO: 9191 - DNA, 20 bp, Homo sapiens
ttctctgctattcaaaagag

SEQ ID NO: 9192 - DNA, 20 bp, Homo sapiens
ctcccagatatggcagtctg

SEQ ID NO: 9193 - DNA, 20 bp, Homo sapiens
aaacctcagactgccatatc

SEQ ID NO: 9194 - DNA, 20 bp, Homo sapiens
aacctcagactgccatatct

SEQ ID NO: 9195 - DNA, 20 bp, Homo sapiens
gctaaaatctctcccagata

SEQ ID NO: 9196 - DNA, 20 bp, Homo sapiens
tgaaatagaagggaaatggg

SEQ ID NO: 9197 - DNA, 20 bp, Homo sapiens
gcttgaaatagaagggaaat

SEQ ID NO: 9198 - DNA, 20 bp, Homo sapiens
agcttgaaatagaagggaaa

SEQ ID NO: 9199 - DNA, 20 bp, Homo sapiens
gttactagcttgaaatagaa

SEQ ID NO: 9200 - DNA, 20 bp, Homo sapiens
agttactagcttgaaataga

SEQ ID NO: 9201 - DNA, 20 bp, Homo sapiens
aatgtaaaaataagtctatt

SEQ ID NO: 9202 - DNA, 20 bp, Homo sapiens
aaaaattttaatagcatctc

SEQ ID NO: 9203 - DNA, 20 bp, Homo sapiens
gcatctctggaatgccagta

SEQ ID NO: 9204 - DNA, 20 bp, Homo sapiens
attcatgaatttagccatac

SEQ ID NO: 9205 - DNA, 20 bp, Homo sapiens
ttcccagatttcagcatttg

SEQ ID NO: 9206 - DNA, 20 bp, Homo sapiens
tgtcctcaaatgctgaaatc

SEQ ID NO: 9207 - DNA, 20 bp, Homo sapiens
gtcctcaaatgctgaaatct

SEQ ID NO: 9208 - DNA, 20 bp, Homo sapiens
gctgaaatctgggaagcatc

SEQ ID NO: 9209 - DNA, 20 bp, Homo sapiens
gcaggcctgtccacaaagct

SEQ ID NO: 9210 - DNA, 20 bp, Homo sapiens
aagcatctggccaagctttg

SEQ ID NO: 9211 - DNA, 20 bp, Homo sapiens
tctggccaagctttgtggac

SEQ ID NO: 9212 - DNA, 20 bp, Homo sapiens
tcttgggattcaaactaggc

SEQ ID NO: 9213 - DNA, 20 bp, Homo sapiens
tggctcttgggattcaaact

SEQ ID NO: 9214 - DNA, 20 bp, Homo sapiens
gcttggactgggtggctctt

SEQ ID NO: 9215 - DNA, 20 bp, Homo sapiens
ggcttggactgggtggctct

SEQ ID NO: 9216 - DNA, 20 bp, Homo sapiens
gttttgtggcttggactggg

SEQ ID NO: 9217 - DNA, 20 bp, Homo sapiens
aatgttttgtggcttggact

SEQ ID NO: 9218 - DNA, 20 bp, Homo sapiens
caatgttttgtggcttggac

SEQ ID NO: 9219 - DNA, 20 bp, Homo sapiens
aattccaatgttttgtggct

SEQ ID NO: 9220 - DNA, 20 bp, Homo sapiens
ccaagaattccaatgttttg

SEQ ID NO: 9221 - DNA, 20 bp, Homo sapiens
cagtccaagccacaaaacat

SEQ ID NO: 9222 - DNA, 20 bp, Homo sapiens
ccacaaaacattggaattct

SEQ ID NO: 9223 - DNA, 20 bp, Homo sapiens
cagagggcaagttcaggtta

SEQ ID NO: 9224 - DNA, 20 bp, Homo sapiens
acagagggcaagttcaggtt

SEQ ID NO: 9225 - DNA, 20 bp, Homo sapiens
atttcacagagggcaagttc

SEQ ID NO: 9226 - DNA, 20 bp, Homo sapiens
tagtgtccctatttcacaga

SEQ ID NO: 9227 - DNA, 20 bp, Homo sapiens
ttagtgtccctatttcacag

SEQ ID NO: 9228 - DNA, 20 bp, Homo sapiens
gaacttgccctctgtgaaat

SEQ ID NO: 9229 - DNA, 20 bp, Homo sapiens
aacttgccctctgtgaaata

SEQ ID NO: 9230 - DNA, 20 bp, Homo sapiens
gacactaatagctcactcac

SEQ ID NO: 9231 - DNA, 20 bp, Homo sapiens
acactaatagctcactcaca

SEQ ID NO: 9232 - DNA, 20 bp, Homo sapiens
tcactcacagggctgctgtg

SEQ ID NO: 9233 - DNA, 20 bp, Homo sapiens
tgaggacatgtgttgagctg

SEQ ID NO: 9234 - DNA, 20 bp, Homo sapiens
gaggacatgtgttgagctga

SEQ ID NO: 9235 - DNA, 20 bp, Homo sapiens
gttgagctgagggtctcgcc

SEQ ID NO: 9236 - DNA, 20 bp, Homo sapiens
ttgagctgagggtctcgcca

SEQ ID NO: 9237 - DNA, 20 bp, Homo sapiens
tgagctgagggtctcgccag

SEQ ID NO: 9238 - DNA, 20 bp, Homo sapiens
tccctgcacagggtctcccc

SEQ ID NO: 9239 - DNA, 20 bp, Homo sapiens
cgccaggggagaccctgtgc

SEQ ID NO: 9240 - DNA, 20 bp, Homo sapiens
gccaggggagaccctgtgca

SEQ ID NO: 9241 - DNA, 20 bp, Homo sapiens
gataacagtctccctgcaca

SEQ ID NO: 9242 - DNA, 20 bp, Homo sapiens
tgataacagtctccctgcac

SEQ ID NO: 9243 - DNA, 20 bp, Homo sapiens
gtgcagggagactgttatca

SEQ ID NO: 9244 - DNA, 20 bp, Homo sapiens
ggagactgttatcatggtga

SEQ ID NO: 9245 - DNA, 20 bp, Homo sapiens
tcattctatatgatgctgtc

SEQ ID NO: 9246 - DNA, 20 bp, Homo sapiens
gcatcatatagaatgagttg

SEQ ID NO: 9247 - DNA, 20 bp, Homo sapiens
catcatatagaatgagttgt

SEQ ID NO: 9248 - DNA, 20 bp, Homo sapiens
atcatatagaatgagttgtg

SEQ ID NO: 9249 - DNA, 20 bp, Homo sapiens
atatagaatgagttgtgggg

SEQ ID NO: 9250 - DNA, 20 bp, Homo sapiens
gttgtggggtggcagtcagc

SEQ ID NO: 9251 - DNA, 20 bp, Homo sapiens
ggggtggcagtcagcaggtt

SEQ ID NO: 9252 - DNA, 20 bp, Homo sapiens
gggtggcagtcagcaggttt

SEQ ID NO: 9253 - DNA, 20 bp, Homo sapiens
agtaataagtggcagaatag

SEQ ID NO: 9254 - DNA, 20 bp, Homo sapiens
gggtttttttaagtaataag

SEQ ID NO: 9255 - DNA, 20 bp, Homo sapiens
tatataagttgggttttttg

SEQ ID NO: 9256 - DNA, 20 bp, Homo sapiens
ctatataagttgggtttttt

SEQ ID NO: 9257 - DNA, 20 bp, Homo sapiens
actatataagttgggttttt

SEQ ID NO: 9258 - DNA, 20 bp, Homo sapiens
tagcttatactatataagtt

SEQ ID NO: 9259 - DNA, 20 bp, Homo sapiens
atagcttatactatataagt

SEQ ID NO: 9260 - DNA, 20 bp, Homo sapiens
gtatgatatttgcacttttc

SEQ ID NO: 9261 - DNA, 20 bp, Homo sapiens
atatcagaagattcatcaaa

SEQ ID NO: 9262 - DNA, 20 bp, Homo sapiens
ttctgggtgttggttatgtg

SEQ ID NO: 9263 - DNA, 20 bp, Homo sapiens
gttctgggtgttggttatgt

SEQ ID NO: 9264 - DNA, 20 bp, Homo sapiens
ggttctgggtgttggttatg

SEQ ID NO: 9265 - DNA, 20 bp, Homo sapiens
caagaagaggttctgggtgt

SEQ ID NO: 9266 - DNA, 20 bp, Homo sapiens
atgagacaagaagaggttct

SEQ ID NO: 9267 - DNA, 20 bp, Homo sapiens
aatgagacaagaagaggttc

SEQ ID NO: 9268 - DNA, 20 bp, Homo sapiens
tcctggaatgagacaagaag

SEQ ID NO: 9269 - DNA, 20 bp, Homo sapiens
acctcttcttgtctcattcc

SEQ ID NO: 9270 - DNA, 20 bp, Homo sapiens
agtcaggttagtggttatcc

SEQ ID NO: 9271 - DNA, 20 bp, Homo sapiens
gctgttagaagtcaggttag

SEQ ID NO: 9272 - DNA, 20 bp, Homo sapiens
gactgatgctgttagaagtc

SEQ ID NO: 9273 - DNA, 20 bp, Homo sapiens
tttgtacattatatatgtga

SEQ ID NO: 9274 - DNA, 20 bp, Homo sapiens
ttccagcacatgaaatttgg

SEQ ID NO: 9275 - DNA, 20 bp, Homo sapiens
tttccagcacatgaaatttg

SEQ ID NO: 9276 - DNA, 20 bp, Homo sapiens
gtttccagcacatgaaattt

SEQ ID NO: 9277 - DNA, 20 bp, Homo sapiens
agtttccagcacatgaaatt

SEQ ID NO: 9278 - DNA, 20 bp, Homo sapiens
gtcccccaaatttcatgtgc

SEQ ID NO: 9279 - DNA, 20 bp, Homo sapiens
accatcaacatatgaattga

SEQ ID NO: 9280 - DNA, 20 bp, Homo sapiens
tccttcaattcatatgttga

SEQ ID NO: 9281 - DNA, 20 bp, Homo sapiens
attcatatgttgatggtttt

SEQ ID NO: 9282 - DNA, 20 bp, Homo sapiens
catatgttgatggtttttgg

SEQ ID NO: 9283 - DNA, 20 bp, Homo sapiens
tgttgatggtttttggagga

SEQ ID NO: 9284 - DNA, 20 bp, Homo sapiens
gttgatggtttttggaggaa

SEQ ID NO: 9285 - DNA, 20 bp, Homo sapiens
gtttttggaggaagggcctt

SEQ ID NO: 9286 - DNA, 20 bp, Homo sapiens
tttttggaggaagggccttt

SEQ ID NO: 9287 - DNA, 20 bp, Homo sapiens
taatcctaattacttcccaa

SEQ ID NO: 9288 - DNA, 20 bp, Homo sapiens
agggcctttgggaagtaatt

SEQ ID NO: 9289 - DNA, 20 bp, Homo sapiens
gaagtaattaggattagata

SEQ ID NO: 9290 - DNA, 20 bp, Homo sapiens
attaggattagataaggtca

SEQ ID NO: 9291 - DNA, 20 bp, Homo sapiens
ttaggattagataaggtcat

SEQ ID NO: 9292 - DNA, 20 bp, Homo sapiens
taggattagataaggtcatg

SEQ ID NO: 9293 - DNA, 20 bp, Homo sapiens
ttagataaggtcatggggtg

SEQ ID NO: 9294 - DNA, 20 bp, Homo sapiens
ggtcatggggtgaggtatga

SEQ ID NO: 9295 - DNA, 20 bp, Homo sapiens
ggggtgaggtatgatggcac

SEQ ID NO: 9296 - DNA, 20 bp, Homo sapiens
agagaaagagaaatctgagc

SEQ ID NO: 9297 - DNA, 20 bp, Homo sapiens
gaagtcatcacacagtgaga

SEQ ID NO: 9298 - DNA, 20 bp, Homo sapiens
agaagtcatcacacagtgag

SEQ ID NO: 9299 - DNA, 20 bp, Homo sapiens
cttcttgctgcatcatgaca

SEQ ID NO: 9300 - DNA, 20 bp, Homo sapiens
catgtcatgatgcagcaaga

SEQ ID NO: 9301 - DNA, 20 bp, Homo sapiens
atggtgccaccatctggtga

SEQ ID NO: 9302 - DNA, 20 bp, Homo sapiens
catggtgccaccatctggtg

SEQ ID NO: 9303 - DNA, 20 bp, Homo sapiens
gcaagaaggccctcaccaga

SEQ ID NO: 9304 - DNA, 20 bp, Homo sapiens
agaaggccctcaccagatgg

SEQ ID NO: 9305 - DNA, 20 bp, Homo sapiens
aaaagcatggtgccaccatc

SEQ ID NO: 9306 - DNA, 20 bp, Homo sapiens
agatggtggcaccatgcttt

SEQ ID NO: 9307 - DNA, 20 bp, Homo sapiens
ggctgggaagtccaaaagca

SEQ ID NO: 9308 - DNA, 20 bp, Homo sapiens
agctcacagttctagaggct

SEQ ID NO: 9309 - DNA, 20 bp, Homo sapiens
tagctcacagttctagaggc

SEQ ID NO: 9310 - DNA, 20 bp, Homo sapiens
gatttagctcacagttctag

SEQ ID NO: 9311 - DNA, 20 bp, Homo sapiens
ctatgacaaaatatcaaact

SEQ ID NO: 9312 - DNA, 20 bp, Homo sapiens
gctatgacaaaatatcaaac

SEQ ID NO: 9313 - DNA, 20 bp, Homo sapiens
tttgtcatagcaacagaata

SEQ ID NO: 9314 - DNA, 20 bp, Homo sapiens
aaagccacttccacattttc

SEQ ID NO: 9315 - DNA, 20 bp, Homo sapiens
gtaacagattcctgaaaatg

SEQ ID NO: 9316 - DNA, 20 bp, Homo sapiens
gattcctgaaaatgtggaag

SEQ ID NO: 9317 - DNA, 20 bp, Homo sapiens
tgaaaatgtggaagtggctt

SEQ ID NO: 9318 - DNA, 20 bp, Homo sapiens
tgtggaagtggctttggaac

SEQ ID NO: 9319 - DNA, 20 bp, Homo sapiens
gtggaagtggctttggaact

SEQ ID NO: 9320 - DNA, 20 bp, Homo sapiens
gtggctttggaactgggtga

SEQ ID NO: 9321 - DNA, 20 bp, Homo sapiens
tggctttggaactgggtgat

SEQ ID NO: 9322 - DNA, 20 bp, Homo sapiens
tggaactgggtgatgggaat

SEQ ID NO: 9323 - DNA, 20 bp, Homo sapiens
actgggtgatgggaataggt

SEQ ID NO: 9324 - DNA, 20 bp, Homo sapiens
aataggttggaagagttttg

SEQ ID NO: 9325 - DNA, 20 bp, Homo sapiens
ttggaagagttttgaggagc

SEQ ID NO: 9326 - DNA, 20 bp, Homo sapiens
tgctccattcttgacaatac

SEQ ID NO: 9327 - DNA, 20 bp, Homo sapiens
aaagcctgtattgtcaagaa

SEQ ID NO: 9328 - DNA, 20 bp, Homo sapiens
caagaatggagcattatgcc

SEQ ID NO: 9329 - DNA, 20 bp, Homo sapiens
atggagcattatgccaggca

SEQ ID NO: 9330 - DNA, 20 bp, Homo sapiens
taagcctgagacaccgtgcc

SEQ ID NO: 9331 - DNA, 20 bp, Homo sapiens
tatgccaggcacggtgtctc

SEQ ID NO: 9332 - DNA, 20 bp, Homo sapiens
ctttggcctcccaaagtgct

SEQ ID NO: 9333 - DNA, 20 bp, Homo sapiens
ggcttataatcccagcactt

SEQ ID NO: 9334 - DNA, 20 bp, Homo sapiens
gctttggcctcccaaagtgc

SEQ ID NO: 9335 - DNA, 20 bp, Homo sapiens
gcttataatcccagcacttt

SEQ ID NO: 9336 - DNA, 20 bp, Homo sapiens
tataatcccagcactttggg

SEQ ID NO: 9337 - DNA, 20 bp, Homo sapiens
gcactttgggaggccaaagc

SEQ ID NO: 9338 - DNA, 20 bp, Homo sapiens
ctcaggtgatccacctgctt

SEQ ID NO: 9339 - DNA, 20 bp, Homo sapiens
ctttgggaggccaaagcagg

SEQ ID NO: 9340 - DNA, 20 bp, Homo sapiens
caaagcaggtggatcacctg

SEQ ID NO: 9341 - DNA, 20 bp, Homo sapiens
caggtggatcacctgaggtc

SEQ ID NO: 9342 - DNA, 20 bp, Homo sapiens
ggtctcgaactcctgacctc

SEQ ID NO: 9343 - DNA, 20 bp, Homo sapiens
tttcaccatgttagctaggc

SEQ ID NO: 9344 - DNA, 20 bp, Homo sapiens
agcgtttcaccatgttagct

SEQ ID NO: 9345 - DNA, 20 bp, Homo sapiens
cgagaccagcctagctaaca

SEQ ID NO: 9346 - DNA, 20 bp, Homo sapiens
cagctaattttttgtatttt

SEQ ID NO: 9347 - DNA, 20 bp, Homo sapiens
caaaaatacaaaaaattagc

SEQ ID NO: 9348 - DNA, 20 bp, Homo sapiens
aaaaatacaaaaaattagct

SEQ ID NO: 9349 - DNA, 20 bp, Homo sapiens
tacaaaaaattagctgggcg

SEQ ID NO: 9350 - DNA, 20 bp, Homo sapiens
aaaaaattagctgggcgtgg

SEQ ID NO: 9351 - DNA, 20 bp, Homo sapiens
tcctgagtagctgagattac

SEQ ID NO: 9352 - DNA, 20 bp, Homo sapiens
acctgtaatctcagctactc

SEQ ID NO: 9353 - DNA, 20 bp, Homo sapiens
tgtaatctcagctactcagg

SEQ ID NO: 9354 - DNA, 20 bp, Homo sapiens
gctactcaggaggctgaagc

SEQ ID NO: 9355 - DNA, 20 bp, Homo sapiens
caggagaatcacttgaaccc

SEQ ID NO: 9356 - DNA, 20 bp, Homo sapiens
gagaatcacttgaacccagg

SEQ ID NO: 9357 - DNA, 20 bp, Homo sapiens
cactgcaacctctgcctcct

SEQ ID NO: 9358 - DNA, 20 bp, Homo sapiens
tcactgcaacctctgcctcc

SEQ ID NO: 9359 - DNA, 20 bp, Homo sapiens
cacttgaacccaggaggcag

SEQ ID NO: 9360 - DNA, 20 bp, Homo sapiens
cgtgctattgcactccagct

SEQ ID NO: 9361 - DNA, 20 bp, Homo sapiens
gtgctattgcactccagctt

SEQ ID NO: 9362 - DNA, 20 bp, Homo sapiens
tttgctcttgttgcccaagc

SEQ ID NO: 9363 - DNA, 20 bp, Homo sapiens
ctttttttttttttttgaga

SEQ ID NO: 9364 - DNA, 20 bp, Homo sapiens
taaagacagttctgcagttc

SEQ ID NO: 9365 - DNA, 20 bp, Homo sapiens
acagttctgcagttctggtg

SEQ ID NO: 9366 - DNA, 20 bp, Homo sapiens
cagttctgcagttctggtga

SEQ ID NO: 9367 - DNA, 20 bp, Homo sapiens
cagttctggtgagggcttaa

SEQ ID NO: 9368 - DNA, 20 bp, Homo sapiens
ccagactttccctagttctg

SEQ ID NO: 9369 - DNA, 20 bp, Homo sapiens
taaaggaagaccccagaact

SEQ ID NO: 9370 - DNA, 20 bp, Homo sapiens
tccagactttccctagttct

SEQ ID NO: 9371 - DNA, 20 bp, Homo sapiens
aaaggaagaccccagaacta

SEQ ID NO: 9372 - DNA, 20 bp, Homo sapiens
ttccagactttccctagttc

SEQ ID NO: 9373 - DNA, 20 bp, Homo sapiens
ccccagaactagggaaagtc

SEQ ID NO: 9374 - DNA, 20 bp, Homo sapiens
gaaagtctggaacttcttaa

SEQ ID NO: 9375 - DNA, 20 bp, Homo sapiens
tcagagtgctgatagaaata

SEQ ID NO: 9376 - DNA, 20 bp, Homo sapiens
agtgctgatagaaatatggc

SEQ ID NO: 9377 - DNA, 20 bp, Homo sapiens
gatagaaatatggctggtaa

SEQ ID NO: 9378 - DNA, 20 bp, Homo sapiens
tatctgagacctcatcagaa

SEQ ID NO: 9379 - DNA, 20 bp, Homo sapiens
tggtaaaggccattctgatg

SEQ ID NO: 9380 - DNA, 20 bp, Homo sapiens
agaactgaagaaccacgtgt

SEQ ID NO: 9381 - DNA, 20 bp, Homo sapiens
ttgctccagtttccaacacg

SEQ ID NO: 9382 - DNA, 20 bp, Homo sapiens
aagaaccacgtgttggaaac

SEQ ID NO: 9383 - DNA, 20 bp, Homo sapiens
cgtgttggaaactggagcaa

SEQ ID NO: 9384 - DNA, 20 bp, Homo sapiens
atctttgcttctttataaaa

SEQ ID NO: 9385 - DNA, 20 bp, Homo sapiens
ctgccttccataaatgactc

SEQ ID NO: 9386 - DNA, 20 bp, Homo sapiens
ttctgtgccagagtcattta

SEQ ID NO: 9387 - DNA, 20 bp, Homo sapiens
gtgccagagtcatttatgga

SEQ ID NO: 9388 - DNA, 20 bp, Homo sapiens
atggaaggcagaaaatctgt

SEQ ID NO: 9389 - DNA, 20 bp, Homo sapiens
ctgtaggtcagccatgttgt

SEQ ID NO: 9390 - DNA, 20 bp, Homo sapiens
ttctttcattccctacaaca

SEQ ID NO: 9391 - DNA, 20 bp, Homo sapiens
tgtaggtcagccatgttgta

SEQ ID NO: 9392 - DNA, 20 bp, Homo sapiens
gtactagttttcttatcagt

SEQ ID NO: 9393 - DNA, 20 bp, Homo sapiens
ctagtacacataaattagcc

SEQ ID NO: 9394 - DNA, 20 bp, Homo sapiens
acacataaattagccaggcg

SEQ ID NO: 9395 - DNA, 20 bp, Homo sapiens
caggcgcccaccaccacgcc

SEQ ID NO: 9396 - DNA, 20 bp, Homo sapiens
cataaattagccaggcgtgg

SEQ ID NO: 9397 - DNA, 20 bp, Homo sapiens
aaattagccaggcgtggtgg

SEQ ID NO: 9398 - DNA, 20 bp, Homo sapiens
aattagccaggcgtggtggt

SEQ ID NO: 9399 - DNA, 20 bp, Homo sapiens
tcccaggtagctgggaatac

SEQ ID NO: 9400 - DNA, 20 bp, Homo sapiens
cctcagcctcccaggtagct

SEQ ID NO: 9401 - DNA, 20 bp, Homo sapiens
cgcctgtattcccagctacc

SEQ ID NO: 9402 - DNA, 20 bp, Homo sapiens
gcctcagcctcccaggtagc

SEQ ID NO: 9403 - DNA, 20 bp, Homo sapiens
gcctgtattcccagctacct

SEQ ID NO: 9404 - DNA, 20 bp, Homo sapiens
tgtattcccagctacctggg

SEQ ID NO: 9405 - DNA, 20 bp, Homo sapiens
ttctcctgcctcagcctccc

SEQ ID NO: 9406 - DNA, 20 bp, Homo sapiens
cccagctacctgggaggctg

SEQ ID NO: 9407 - DNA, 20 bp, Homo sapiens
gctacctgggaggctgaggc

SEQ ID NO: 9408 - DNA, 20 bp, Homo sapiens
gggaggctgaggcaggagaa

SEQ ID NO: 9409 - DNA, 20 bp, Homo sapiens
gcaggagaatggcatgaacc

SEQ ID NO: 9410 - DNA, 20 bp, Homo sapiens
caggagaatggcatgaaccc

SEQ ID NO: 9411 - DNA, 20 bp, Homo sapiens
gagaatggcatgaacccggg

SEQ ID NO: 9412 - DNA, 20 bp, Homo sapiens
cactgcaagctctgcctccc

SEQ ID NO: 9413 - DNA, 20 bp, Homo sapiens
tcactgcaagctctgcctcc

SEQ ID NO: 9414 - DNA, 20 bp, Homo sapiens
ggagtgcagtggcgcgatct

SEQ ID NO: 9415 - DNA, 20 bp, Homo sapiens
tcgcccaggctggagtgcag

SEQ ID NO: 9416 - DNA, 20 bp, Homo sapiens
cgcgccactgcactccagcc

SEQ ID NO: 9417 - DNA, 20 bp, Homo sapiens
gcgccactgcactccagcct

SEQ ID NO: 9418 - DNA, 20 bp, Homo sapiens
ttttgctctgtcgcccaggc

SEQ ID NO: 9419 - DNA, 20 bp, Homo sapiens
ggagttttgctctgtcgccc

SEQ ID NO: 9420 - DNA, 20 bp, Homo sapiens
ttttttttttctttttgaga

SEQ ID NO: 9421 - DNA, 20 bp, Homo sapiens
gtctcaaaaagaaaaaaaaa

SEQ ID NO: 9422 - DNA, 20 bp, Homo sapiens
tacacatagaacaaagccag

SEQ ID NO: 9423 - DNA, 20 bp, Homo sapiens
ttgtcctgatgaacagcctc

SEQ ID NO: 9424 - DNA, 20 bp, Homo sapiens
aaagccagaggctgttcatc

SEQ ID NO: 9425 - DNA, 20 bp, Homo sapiens
agaggctgttcatcaggaca

SEQ ID NO: 9426 - DNA, 20 bp, Homo sapiens
gaggctgttcatcaggacaa

SEQ ID NO: 9427 - DNA, 20 bp, Homo sapiens
gaagatctctgaaatggctt

SEQ ID NO: 9428 - DNA, 20 bp, Homo sapiens
agtcttgaagatctctgaaa

SEQ ID NO: 9429 - DNA, 20 bp, Homo sapiens
ctctgggccagtaatgggag

SEQ ID NO: 9430 - DNA, 20 bp, Homo sapiens
gctctgggccagtaatggga

SEQ ID NO: 9431 - DNA, 20 bp, Homo sapiens
agctctgggccagtaatggg

SEQ ID NO: 9432 - DNA, 20 bp, Homo sapiens
aagactgcccctcccattac

SEQ ID NO: 9433 - DNA, 20 bp, Homo sapiens
tagagctctgggccagtaat

SEQ ID NO: 9434 - DNA, 20 bp, Homo sapiens
ttagagctctgggccagtaa

SEQ ID NO: 9435 - DNA, 20 bp, Homo sapiens
ttctgccctcttagagctct

SEQ ID NO: 9436 - DNA, 20 bp, Homo sapiens
attctgccctcttagagctc

SEQ ID NO: 9437 - DNA, 20 bp, Homo sapiens
tactggcccagagctctaag

SEQ ID NO: 9438 - DNA, 20 bp, Homo sapiens
actggcccagagctctaaga

SEQ ID NO: 9439 - DNA, 20 bp, Homo sapiens
agagctctaagagggcagaa

SEQ ID NO: 9440 - DNA, 20 bp, Homo sapiens
tctaagagggcagaatggtt

SEQ ID NO: 9441 - DNA, 20 bp, Homo sapiens
aggcagccctgggcagcagc

SEQ ID NO: 9442 - DNA, 20 bp, Homo sapiens
ggaatgaccagctgctgccc

SEQ ID NO: 9443 - DNA, 20 bp, Homo sapiens
gaatgaccagctgctgccca

SEQ ID NO: 9444 - DNA, 20 bp, Homo sapiens
cagagacccaaggcagccct

SEQ ID NO: 9445 - DNA, 20 bp, Homo sapiens
gcagagacccaaggcagccc

SEQ ID NO: 9446 - DNA, 20 bp, Homo sapiens
gctgctgcccagggctgcct

SEQ ID NO: 9447 - DNA, 20 bp, Homo sapiens
ctgctgcccagggctgcctt

SEQ ID NO: 9448 - DNA, 20 bp, Homo sapiens
atgtggggagcagagaccca

SEQ ID NO: 9449 - DNA, 20 bp, Homo sapiens
aatgctgcaccagaaatgtg

SEQ ID NO: 9450 - DNA, 20 bp, Homo sapiens
gaatgctgcaccagaaatgt

SEQ ID NO: 9451 - DNA, 20 bp, Homo sapiens
gtctctgctccccacatttc

SEQ ID NO: 9452 - DNA, 20 bp, Homo sapiens
ggaatgctgcaccagaaatg

SEQ ID NO: 9453 - DNA, 20 bp, Homo sapiens
aaccacagctgggatggctg

SEQ ID NO: 9454 - DNA, 20 bp, Homo sapiens
cacctgaaccacagctggga

SEQ ID NO: 9455 - DNA, 20 bp, Homo sapiens
ttcctcagccatcccagctg

SEQ ID NO: 9456 - DNA, 20 bp, Homo sapiens
tggccacctgaaccacagct

SEQ ID NO: 9457 - DNA, 20 bp, Homo sapiens
gtggccacctgaaccacagc

SEQ ID NO: 9458 - DNA, 20 bp, Homo sapiens
agccatcccagctgtggttc

SEQ ID NO: 9459 - DNA, 20 bp, Homo sapiens
catcccagctgtggttcagg

SEQ ID NO: 9460 - DNA, 20 bp, Homo sapiens
gctgtggttcaggtggccac

SEQ ID NO: 9461 - DNA, 20 bp, Homo sapiens
taccttccacatcacacctg

SEQ ID NO: 9462 - DNA, 20 bp, Homo sapiens
aggtggccacaggtgtgatg

SEQ ID NO: 9463 - DNA, 20 bp, Homo sapiens
ggccacaggtgtgatgtgga

SEQ ID NO: 9464 - DNA, 20 bp, Homo sapiens
aaggtaaaagtcataaacct

SEQ ID NO: 9465 - DNA, 20 bp, Homo sapiens
gtgccatgtgtatgctgcca

SEQ ID NO: 9466 - DNA, 20 bp, Homo sapiens
aaaccttggcagcatacaca

SEQ ID NO: 9467 - DNA, 20 bp, Homo sapiens
acacatggcactaattttgc

SEQ ID NO: 9468 - DNA, 20 bp, Homo sapiens
tgtgcagaatgcaaaagctg

SEQ ID NO: 9469 - DNA, 20 bp, Homo sapiens
gtgcagaatgcaaaagctga

SEQ ID NO: 9470 - DNA, 20 bp, Homo sapiens
tgcagaatgcaaaagctgag

SEQ ID NO: 9471 - DNA, 20 bp, Homo sapiens
gcagaatgcaaaagctgagg

SEQ ID NO: 9472 - DNA, 20 bp, Homo sapiens
tttgaaatgtaggtggaaga

SEQ ID NO: 9473 - DNA, 20 bp, Homo sapiens
agcaccctttgaaatgtagg

SEQ ID NO: 9474 - DNA, 20 bp, Homo sapiens
cacagcaccctttgaaatgt

SEQ ID NO: 9475 - DNA, 20 bp, Homo sapiens
ttcttccacctacatttcaa

SEQ ID NO: 9476 - DNA, 20 bp, Homo sapiens
tcttccacctacatttcaaa

SEQ ID NO: 9477 - DNA, 20 bp, Homo sapiens
ctactaggggctctctgggg

SEQ ID NO: 9478 - DNA, 20 bp, Homo sapiens
gctctactaggggctctctg

SEQ ID NO: 9479 - DNA, 20 bp, Homo sapiens
tgctctactaggggctctct

SEQ ID NO: 9480 - DNA, 20 bp, Homo sapiens
ctgctctactaggggctctc

SEQ ID NO: 9481 - DNA, 20 bp, Homo sapiens
actagaccctgctctactag

SEQ ID NO: 9482 - DNA, 20 bp, Homo sapiens
cactagaccctgctctacta

SEQ ID NO: 9483 - DNA, 20 bp, Homo sapiens
ccactagaccctgctctact

SEQ ID NO: 9484 - DNA, 20 bp, Homo sapiens
cagagagcccctagtagagc

SEQ ID NO: 9485 - DNA, 20 bp, Homo sapiens
agagagcccctagtagagca

SEQ ID NO: 9486 - DNA, 20 bp, Homo sapiens
cctagtagagcagggtctag

SEQ ID NO: 9487 - DNA, 20 bp, Homo sapiens
cagggtctagtggagctaca

SEQ ID NO: 9488 - DNA, 20 bp, Homo sapiens
agggtctagtggagctacaa

SEQ ID NO: 9489 - DNA, 20 bp, Homo sapiens
gtctagtggagctacaaggg

SEQ ID NO: 9490 - DNA, 20 bp, Homo sapiens
tctagtggagctacaagggt

SEQ ID NO: 9491 - DNA, 20 bp, Homo sapiens
ctagtggagctacaagggtg

SEQ ID NO: 9492 - DNA, 20 bp, Homo sapiens
ccattctggggtcttggcgg

SEQ ID NO: 9493 - DNA, 20 bp, Homo sapiens
ctaccattctggggtcttgg

SEQ ID NO: 9494 - DNA, 20 bp, Homo sapiens
gctctaccattctggggtct

SEQ ID NO: 9495 - DNA, 20 bp, Homo sapiens
ccaccgccaagaccccagaa

SEQ ID NO: 9496 - DNA, 20 bp, Homo sapiens
atgatagctctaccattctg

SEQ ID NO: 9497 - DNA, 20 bp, Homo sapiens
tatgatagctctaccattct

SEQ ID NO: 9498 - DNA, 20 bp, Homo sapiens
ctatgatagctctaccattc

SEQ ID NO: 9499 - DNA, 20 bp, Homo sapiens
atcatagtgcaatgccagct

SEQ ID NO: 9500 - DNA, 20 bp, Homo sapiens
tcatagtgcaatgccagctt

SEQ ID NO: 9501 - DNA, 20 bp, Homo sapiens
tgcctgcagttctcccaagc

SEQ ID NO: 9502 - DNA, 20 bp, Homo sapiens
tgccagcttgggagaactgc

SEQ ID NO: 9503 - DNA, 20 bp, Homo sapiens
atgttgcacttcgcacaggt

SEQ ID NO: 9504 - DNA, 20 bp, Homo sapiens
gcccatgttgcacttcgcac

SEQ ID NO: 9505 - DNA, 20 bp, Homo sapiens
aacctgtgcgaagtgcaaca

SEQ ID NO: 9506 - DNA, 20 bp, Homo sapiens
acctgtgcgaagtgcaacat

SEQ ID NO: 9507 - DNA, 20 bp, Homo sapiens
tctgcccctgtggttttgct

SEQ ID NO: 9508 - DNA, 20 bp, Homo sapiens
ctctgcccctgtggttttgc

SEQ ID NO: 9509 - DNA, 20 bp, Homo sapiens
gcagaacccagcaaaaccac

SEQ ID NO: 9510 - DNA, 20 bp, Homo sapiens
cagaacccagcaaaaccaca

SEQ ID NO: 9511 - DNA, 20 bp, Homo sapiens
agaacccagcaaaaccacag

SEQ ID NO: 9512 - DNA, 20 bp, Homo sapiens
ttcggggagctctgcccctg

SEQ ID NO: 9513 - DNA, 20 bp, Homo sapiens
tttggacccccgaagcttcg

SEQ ID NO: 9514 - DNA, 20 bp, Homo sapiens
atttggacccccgaagcttc

SEQ ID NO: 9515 - DNA, 20 bp, Homo sapiens
ggcagagctccccgaagctt

SEQ ID NO: 9516 - DNA, 20 bp, Homo sapiens
aatttggacccccgaagctt

SEQ ID NO: 9517 - DNA, 20 bp, Homo sapiens
gcagagctccccgaagcttc

SEQ ID NO: 9518 - DNA, 20 bp, Homo sapiens
cagagctccccgaagcttcg

SEQ ID NO: 9519 - DNA, 20 bp, Homo sapiens
agagctccccgaagcttcgg

SEQ ID NO: 9520 - DNA, 20 bp, Homo sapiens
cctggacacactatggaatt

SEQ ID NO: 9521 - DNA, 20 bp, Homo sapiens
gccacctcctggacacacta

SEQ ID NO: 9522 - DNA, 20 bp, Homo sapiens
ccaaattccatagtgtgtcc

SEQ ID NO: 9523 - DNA, 20 bp, Homo sapiens
aattccatagtgtgtccagg

SEQ ID NO: 9524 - DNA, 20 bp, Homo sapiens
tccatagtgtgtccaggagg

SEQ ID NO: 9525 - DNA, 20 bp, Homo sapiens
ttactctgtgtgccacctcc

SEQ ID NO: 9526 - DNA, 20 bp, Homo sapiens
agagtaaaagatcattctga

SEQ ID NO: 9527 - DNA, 20 bp, Homo sapiens
aagatcattctgaaggttta

SEQ ID NO: 9528 - DNA, 20 bp, Homo sapiens
tttaatgttgttttctatgt

SEQ ID NO: 9529 - DNA, 20 bp, Homo sapiens
ttaatgttgttttctatgtt

SEQ ID NO: 9530 - DNA, 20 bp, Homo sapiens
tgttgggttttgtactttcc

SEQ ID NO: 9531 - DNA, 20 bp, Homo sapiens
gaaaaagggtaactggttcc

SEQ ID NO: 9532 - DNA, 20 bp, Homo sapiens
ggcaagggaaaaagggtaac

SEQ ID NO: 9533 - DNA, 20 bp, Homo sapiens
aaaaagaggcaagggaaaaa

SEQ ID NO: 9534 - DNA, 20 bp, Homo sapiens
gaaaaagaggcaagggaaaa

SEQ ID NO: 9535 - DNA, 20 bp, Homo sapiens
ctaaaaggaaaaagaggcaa

SEQ ID NO: 9536 - DNA, 20 bp, Homo sapiens
tctaaaaggaaaaagaggca

SEQ ID NO: 9537 - DNA, 20 bp, Homo sapiens
cccattctaaaaggaaaaag

SEQ ID NO: 9538 - DNA, 20 bp, Homo sapiens
acagacattcccattctaaa

SEQ ID NO: 9539 - DNA, 20 bp, Homo sapiens
gcctctttttccttttagaa

SEQ ID NO: 9540 - DNA, 20 bp, Homo sapiens
cctctttttccttttagaat

SEQ ID NO: 9541 - DNA, 20 bp, Homo sapiens
tacaacagtggaacaggcat

SEQ ID NO: 9542 - DNA, 20 bp, Homo sapiens
ccaaaatacaacagtggaac

SEQ ID NO: 9543 - DNA, 20 bp, Homo sapiens
tgacttccaaaatacaacag

SEQ ID NO: 9544 - DNA, 20 bp, Homo sapiens
cctgttccactgttgtattt

SEQ ID NO: 9545 - DNA, 20 bp, Homo sapiens
ataacttgttttgactttac

SEQ ID NO: 9546 - DNA, 20 bp, Homo sapiens
ctttacaggcttacagccag

SEQ ID NO: 9547 - DNA, 20 bp, Homo sapiens
tttacaggcttacagccaga

SEQ ID NO: 9548 - DNA, 20 bp, Homo sapiens
attctatgggagattccctc

SEQ ID NO: 9549 - DNA, 20 bp, Homo sapiens
taaggtacaattcattctat

SEQ ID NO: 9550 - DNA, 20 bp, Homo sapiens
ttaaggtacaattcattcta

SEQ ID NO: 9551 - DNA, 20 bp, Homo sapiens
actcaaaattccaaagtcca

SEQ ID NO: 9552 - DNA, 20 bp, Homo sapiens
ttagatgagaccatggactt

SEQ ID NO: 9553 - DNA, 20 bp, Homo sapiens
tggactttggaattttgagt

SEQ ID NO: 9554 - DNA, 20 bp, Homo sapiens
ttggaattttgagttggtgc

SEQ ID NO: 9555 - DNA, 20 bp, Homo sapiens
gctggaacaagttaagactt

SEQ ID NO: 9556 - DNA, 20 bp, Homo sapiens
ctggaacaagttaagacttt

SEQ ID NO: 9557 - DNA, 20 bp, Homo sapiens
tggaacaagttaagactttg

SEQ ID NO: 9558 - DNA, 20 bp, Homo sapiens
ggaacaagttaagactttgg

SEQ ID NO: 9559 - DNA, 20 bp, Homo sapiens
ctttgggggttgtctaagtg

SEQ ID NO: 9560 - DNA, 20 bp, Homo sapiens
tcccaaatcactgggattac

SEQ ID NO: 9561 - DNA, 20 bp, Homo sapiens
cctcaacctcccaaatcact

SEQ ID NO: 9562 - DNA, 20 bp, Homo sapiens
tgcctgtaatcccagtgatt

SEQ ID NO: 9563 - DNA, 20 bp, Homo sapiens
acctcaacctcccaaatcac

SEQ ID NO: 9564 - DNA, 20 bp, Homo sapiens
gcctgtaatcccagtgattt

SEQ ID NO: 9565 - DNA, 20 bp, Homo sapiens
tgtaatcccagtgatttggg

SEQ ID NO: 9566 - DNA, 20 bp, Homo sapiens
cccagtgatttgggaggttg

SEQ ID NO: 9567 - DNA, 20 bp, Homo sapiens
agtgatttgggaggttgagg

SEQ ID NO: 9568 - DNA, 20 bp, Homo sapiens
gtgatttgggaggttgaggt

SEQ ID NO: 9569 - DNA, 20 bp, Homo sapiens
atttgggaggttgaggtggg

SEQ ID NO: 9570 - DNA, 20 bp, Homo sapiens
tgggaggattgcttgagccc

SEQ ID NO: 9571 - DNA, 20 bp, Homo sapiens
caggctggtcttgagctcct

SEQ ID NO: 9572 - DNA, 20 bp, Homo sapiens
ccaggctggtcttgagctcc

SEQ ID NO: 9573 - DNA, 20 bp, Homo sapiens
ccaggagctcaagaccagcc

SEQ ID NO: 9574 - DNA, 20 bp, Homo sapiens
caggagctcaagaccagcct

SEQ ID NO: 9575 - DNA, 20 bp, Homo sapiens
tctcactatgttgcccaggc

SEQ ID NO: 9576 - DNA, 20 bp, Homo sapiens
caggtctcactatgttgccc

SEQ ID NO: 9577 - DNA, 20 bp, Homo sapiens
tttttattttttgtagagac

SEQ ID NO: 9578 - DNA, 20 bp, Homo sapiens
taaaaataaaaaaattagcc

SEQ ID NO: 9579 - DNA, 20 bp, Homo sapiens
caggtatatgccacaatacc

SEQ ID NO: 9580 - DNA, 20 bp, Homo sapiens
aaaaaattagccaggtattg

SEQ ID NO: 9581 - DNA, 20 bp, Homo sapiens
tcctgagtagctagaattac

SEQ ID NO: 9582 - DNA, 20 bp, Homo sapiens
acctgtaattctagctactc

SEQ ID NO: 9583 - DNA, 20 bp, Homo sapiens
tgtaattctagctactcagg

SEQ ID NO: 9584 - DNA, 20 bp, Homo sapiens
tctagctactcaggaggctg

SEQ ID NO: 9585 - DNA, 20 bp, Homo sapiens
actcaggaggctgaggtgag

SEQ ID NO: 9586 - DNA, 20 bp, Homo sapiens
tgagaggatcacttgagccc

SEQ ID NO: 9587 - DNA, 20 bp, Homo sapiens
cactgcagcctcaaactcct

SEQ ID NO: 9588 - DNA, 20 bp, Homo sapiens
tcactgcagcctcaaactcc

SEQ ID NO: 9589 - DNA, 20 bp, Homo sapiens
cacttgagcccaggagtttg

SEQ ID NO: 9590 - DNA, 20 bp, Homo sapiens
tttgaggctgcagtgagcta

SEQ ID NO: 9591 - DNA, 20 bp, Homo sapiens
ttgccctggctggaatgcag

SEQ ID NO: 9592 - DNA, 20 bp, Homo sapiens
cgtgccactgcattccagcc

SEQ ID NO: 9593 - DNA, 20 bp, Homo sapiens
gtgccactgcattccagcca

SEQ ID NO: 9594 - DNA, 20 bp, Homo sapiens
tctcactctgttgccctggc

SEQ ID NO: 9595 - DNA, 20 bp, Homo sapiens
agagtctcactctgttgccc

SEQ ID NO: 9596 - DNA, 20 bp, Homo sapiens
taaaattaaataaacttagc

SEQ ID NO: 9597 - DNA, 20 bp, Homo sapiens
taaataaacttagctggata

SEQ ID NO: 9598 - DNA, 20 bp, Homo sapiens
ataaacttagctggatatgg

SEQ ID NO: 9599 - DNA, 20 bp, Homo sapiens
tctcagcctcctgagtagct

SEQ ID NO: 9600 - DNA, 20 bp, Homo sapiens
atctgtagtcctagctactc

SEQ ID NO: 9601 - DNA, 20 bp, Homo sapiens
tgtagtcctagctactcagg

SEQ ID NO: 9602 - DNA, 20 bp, Homo sapiens
gctactcaggaggctgagac

SEQ ID NO: 9603 - DNA, 20 bp, Homo sapiens
actcaggaggctgagacagg

SEQ ID NO: 9604 - DNA, 20 bp, Homo sapiens
caggaggattacttgagcca

SEQ ID NO: 9605 - DNA, 20 bp, Homo sapiens
cactgcagcctcaaactcct

SEQ ID NO: 9606 - DNA, 20 bp, Homo sapiens
tacttgagccaaggagtttg

SEQ ID NO: 9607 - DNA, 20 bp, Homo sapiens
tcatccaggctggaatgcag

SEQ ID NO: 9608 - DNA, 20 bp, Homo sapiens
catgccactgcattccagcc

SEQ ID NO: 9609 - DNA, 20 bp, Homo sapiens
ttttgctctatcatccaggc

SEQ ID NO: 9610 - DNA, 20 bp, Homo sapiens
gggattttgctctatcatcc

SEQ ID NO: 9611 - DNA, 20 bp, Homo sapiens
ttttttttttttttagagat

SEQ ID NO: 9612 - DNA, 20 bp, Homo sapiens
tttttttttttttttagaga

SEQ ID NO: 9613 - DNA, 20 bp, Homo sapiens
aaaaaaaactttagtgctat

SEQ ID NO: 9614 - DNA, 20 bp, Homo sapiens
aatgaattttgcatgtaaga

SEQ ID NO: 9615 - DNA, 20 bp, Homo sapiens
tgtaagaaggacatgcattt

SEQ ID NO: 9616 - DNA, 20 bp, Homo sapiens
gtaagaaggacatgcatttt

SEQ ID NO: 9617 - DNA, 20 bp, Homo sapiens
taagaaggacatgcattttg

SEQ ID NO: 9618 - DNA, 20 bp, Homo sapiens
aagaaggacatgcattttgg

SEQ ID NO: 9619 - DNA, 20 bp, Homo sapiens
aggacatgcattttgggggc

SEQ ID NO: 9620 - DNA, 20 bp, Homo sapiens
ggacatgcattttgggggct

SEQ ID NO: 9621 - DNA, 20 bp, Homo sapiens
gacatgcattttgggggctg

SEQ ID NO: 9622 - DNA, 20 bp, Homo sapiens
tgcattttgggggctggggc

SEQ ID NO: 9623 - DNA, 20 bp, Homo sapiens
ggggctggggcaggatgctg

SEQ ID NO: 9624 - DNA, 20 bp, Homo sapiens
ttccaacacatgaaatttga

SEQ ID NO: 9625 - DNA, 20 bp, Homo sapiens
tttccaacacatgaaatttg

SEQ ID NO: 9626 - DNA, 20 bp, Homo sapiens
atccctcaaatttcatgtgt

SEQ ID NO: 9627 - DNA, 20 bp, Homo sapiens
atttcatcaacatatgaatt

SEQ ID NO: 9628 - DNA, 20 bp, Homo sapiens
aattcatatgttgatgaaat

SEQ ID NO: 9629 - DNA, 20 bp, Homo sapiens
tcatatgttgatgaaattgg

SEQ ID NO: 9630 - DNA, 20 bp, Homo sapiens
gaaattggaggtgaagcctt

SEQ ID NO: 9631 - DNA, 20 bp, Homo sapiens
aaattggaggtgaagccttt

SEQ ID NO: 9632 - DNA, 20 bp, Homo sapiens
ttggaggtgaagcctttggg

SEQ ID NO: 9633 - DNA, 20 bp, Homo sapiens
taatcctagttacctcccaa

SEQ ID NO: 9634 - DNA, 20 bp, Homo sapiens
gaagcctttgggaggtaact

SEQ ID NO: 9635 - DNA, 20 bp, Homo sapiens
taggattagataaagtcatc

SEQ ID NO: 9636 - DNA, 20 bp, Homo sapiens
aggattagataaagtcatca

SEQ ID NO: 9637 - DNA, 20 bp, Homo sapiens
attagataaagtcatcaggg

SEQ ID NO: 9638 - DNA, 20 bp, Homo sapiens
ttagataaagtcatcagggt

SEQ ID NO: 9639 - DNA, 20 bp, Homo sapiens
tagataaagtcatcagggtg

SEQ ID NO: 9640 - DNA, 20 bp, Homo sapiens
agccaccagtctcatcatag

SEQ ID NO: 9641 - DNA, 20 bp, Homo sapiens
aagccaccagtctcatcata

SEQ ID NO: 9642 - DNA, 20 bp, Homo sapiens
taagccaccagtctcatcat

SEQ ID NO: 9643 - DNA, 20 bp, Homo sapiens
tggggcccctatgatgagac

SEQ ID NO: 9644 - DNA, 20 bp, Homo sapiens
ggcccctatgatgagactgg

SEQ ID NO: 9645 - DNA, 20 bp, Homo sapiens
tgagactggtggcttacaag

SEQ ID NO: 9646 - DNA, 20 bp, Homo sapiens
gagggtatcacatggcaaga

SEQ ID NO: 9647 - DNA, 20 bp, Homo sapiens
agagggtatcacatggcaag

SEQ ID NO: 9648 - DNA, 20 bp, Homo sapiens
acatggcagagggtatcaca

SEQ ID NO: 9649 - DNA, 20 bp, Homo sapiens
gcctgccattacatggcaga

SEQ ID NO: 9650 - DNA, 20 bp, Homo sapiens
tgcctgccattacatggcag

SEQ ID NO: 9651 - DNA, 20 bp, Homo sapiens
tgataccctctgccatgtaa

SEQ ID NO: 9652 - DNA, 20 bp, Homo sapiens
ttgctgtgcctgccattaca

SEQ ID NO: 9653 - DNA, 20 bp, Homo sapiens
accctctgccatgtaatggc

SEQ ID NO: 9654 - DNA, 20 bp, Homo sapiens
taatggcaggcacagcaaga

SEQ ID NO: 9655 - DNA, 20 bp, Homo sapiens
catgctgctggcatctgttg

SEQ ID NO: 9656 - DNA, 20 bp, Homo sapiens
gaagtccaagaacatgctgc

SEQ ID NO: 9657 - DNA, 20 bp, Homo sapiens
agatgccagcagcatgttct

SEQ ID NO: 9658 - DNA, 20 bp, Homo sapiens
agctcatggttctggaggct

SEQ ID NO: 9659 - DNA, 20 bp, Homo sapiens
tagctcatggttctggaggc

SEQ ID NO: 9660 - DNA, 20 bp, Homo sapiens
tatatagctcatggttctgg

SEQ ID NO: 9661 - DNA, 20 bp, Homo sapiens
gtatatatagctcatggttc

SEQ ID NO: 9662 - DNA, 20 bp, Homo sapiens
aaataagtatatatagctca

SEQ ID NO: 9663 - DNA, 20 bp, Homo sapiens
tttacaaattacccattctg

SEQ ID NO: 9664 - DNA, 20 bp, Homo sapiens
ataacagaataccacagaat

SEQ ID NO: 9665 - DNA, 20 bp, Homo sapiens
tataacagaataccacagaa

SEQ ID NO: 9666 - DNA, 20 bp, Homo sapiens
atgaactgagataatataca

SEQ ID NO: 9667 - DNA, 20 bp, Homo sapiens
tgtagttgtgagattcatcc

SEQ ID NO: 9668 - DNA, 20 bp, Homo sapiens
tacagcaatgcttaacaacc

SEQ ID NO: 9669 - DNA, 20 bp, Homo sapiens
actatatcccagtggaaaaa

SEQ ID NO: 9670 - DNA, 20 bp, Homo sapiens
cactatatcccagtggaaaa

SEQ ID NO: 9671 - DNA, 20 bp, Homo sapiens
ttgctgtaccctttttccac

SEQ ID NO: 9672 - DNA, 20 bp, Homo sapiens
tgctgtaccctttttccact

SEQ ID NO: 9673 - DNA, 20 bp, Homo sapiens
gacagaacactatatcccag

SEQ ID NO: 9674 - DNA, 20 bp, Homo sapiens
atatagtgttctgtcatgct

SEQ ID NO: 9675 - DNA, 20 bp, Homo sapiens
tatagtgttctgtcatgctt

SEQ ID NO: 9676 - DNA, 20 bp, Homo sapiens
gcttgggtcttaatttataa

SEQ ID NO: 9677 - DNA, 20 bp, Homo sapiens
aatttataaaggtgactgag

SEQ ID NO: 9678 - DNA, 20 bp, Homo sapiens
aactttccttccaataatac

SEQ ID NO: 9679 - DNA, 20 bp, Homo sapiens
gcattttcttccagtattat

SEQ ID NO: 9680 - DNA, 20 bp, Homo sapiens
tttcttccagtattattgga

SEQ ID NO: 9681 - DNA, 20 bp, Homo sapiens
gttctgcctcttgtttacag

SEQ ID NO: 9682 - DNA, 20 bp, Homo sapiens
tgttctgcctcttgtttaca

SEQ ID NO: 9683 - DNA, 20 bp, Homo sapiens
gtgttctgcctcttgtttac

SEQ ID NO: 9684 - DNA, 20 bp, Homo sapiens
acagttcccctgtaaacaag

SEQ ID NO: 9685 - DNA, 20 bp, Homo sapiens
agaggcagaacacgtcatgc

SEQ ID NO: 9686 - DNA, 20 bp, Homo sapiens
gaggcagaacacgtcatgca

SEQ ID NO: 9687 - DNA, 20 bp, Homo sapiens
ctggatgatacagttttgtg

SEQ ID NO: 9688 - DNA, 20 bp, Homo sapiens
cacacaaaactgtatcatcc

SEQ ID NO: 9689 - DNA, 20 bp, Homo sapiens
acacaaaactgtatcatcca

SEQ ID NO: 9690 - DNA, 20 bp, Homo sapiens
aactgtatcatccagggacc

SEQ ID NO: 9691 - DNA, 20 bp, Homo sapiens
tctttctgctgcctggtccc

SEQ ID NO: 9692 - DNA, 20 bp, Homo sapiens
ccccctctctttctgctgcc

SEQ ID NO: 9693 - DNA, 20 bp, Homo sapiens
ggaccaggcagcagaaagag

SEQ ID NO: 9694 - DNA, 20 bp, Homo sapiens
gaccaggcagcagaaagaga

SEQ ID NO: 9695 - DNA, 20 bp, Homo sapiens
accaggcagcagaaagagag

SEQ ID NO: 9696 - DNA, 20 bp, Homo sapiens
ccaggcagcagaaagagagg

SEQ ID NO: 9697 - DNA, 20 bp, Homo sapiens
agcagaaagagagggggaac

SEQ ID NO: 9698 - DNA, 20 bp, Homo sapiens
gcagaaagagagggggaact

SEQ ID NO: 9699 - DNA, 20 bp, Homo sapiens
cccaccactctttttcataa

SEQ ID NO: 9700 - DNA, 20 bp, Homo sapiens
tatgcctttatgaaaaagag

SEQ ID NO: 9701 - DNA, 20 bp, Homo sapiens
gcctttatgaaaaagagtgg

SEQ ID NO: 9702 - DNA, 20 bp, Homo sapiens
cctttatgaaaaagagtggt

SEQ ID NO: 9703 - DNA, 20 bp, Homo sapiens
aagagtggtgggagagtaac

SEQ ID NO: 9704 - DNA, 20 bp, Homo sapiens
agagtggtgggagagtaact

SEQ ID NO: 9705 - DNA, 20 bp, Homo sapiens
ggtgggagagtaactgggtg

SEQ ID NO: 9706 - DNA, 20 bp, Homo sapiens
gtgggagagtaactgggtga

SEQ ID NO: 9707 - DNA, 20 bp, Homo sapiens
tgggtgagggcatccactaa

SEQ ID NO: 9708 - DNA, 20 bp, Homo sapiens
gggtgagggcatccactaat

SEQ ID NO: 9709 - DNA, 20 bp, Homo sapiens
tttcacttcctgcccattag

SEQ ID NO: 9710 - DNA, 20 bp, Homo sapiens
gagggcatccactaatgggc

SEQ ID NO: 9711 - DNA, 20 bp, Homo sapiens
tatgttagaatttgtagctg

SEQ ID NO: 9712 - DNA, 20 bp, Homo sapiens
atgttagaatttgtagctga

SEQ ID NO: 9713 - DNA, 20 bp, Homo sapiens
tgttagaatttgtagctgag

SEQ ID NO: 9714 - DNA, 20 bp, Homo sapiens
aagtcagctttctcaggcat

SEQ ID NO: 9715 - DNA, 20 bp, Homo sapiens
tcttgcaagtcagctttctc

SEQ ID NO: 9716 - DNA, 20 bp, Homo sapiens
gaaaatgagataaacaactt

SEQ ID NO: 9717 - DNA, 20 bp, Homo sapiens
aacaactttggccattagtg

SEQ ID NO: 9718 - DNA, 20 bp, Homo sapiens
ttatgacagggccacactaa

SEQ ID NO: 9719 - DNA, 20 bp, Homo sapiens
tctggcattcatttatgaca

SEQ ID NO: 9720 - DNA, 20 bp, Homo sapiens
atctggcattcatttatgac

SEQ ID NO: 9721 - DNA, 20 bp, Homo sapiens
gtcataaatgaatgccagat

SEQ ID NO: 9722 - DNA, 20 bp, Homo sapiens
agattctctatttgcctatc

SEQ ID NO: 9723 - DNA, 20 bp, Homo sapiens
agaatctaagaaaagatagt

SEQ ID NO: 9724 - DNA, 20 bp, Homo sapiens
attctgctgcattcacacaa

SEQ ID NO: 9725 - DNA, 20 bp, Homo sapiens
aatttatttatccattattg

SEQ ID NO: 9726 - DNA, 20 bp, Homo sapiens
acccaaatcctcctcaataa

SEQ ID NO: 9727 - DNA, 20 bp, Homo sapiens
ttatttatccattattgagg

SEQ ID NO: 9728 - DNA, 20 bp, Homo sapiens
atccattattgaggaggatt

SEQ ID NO: 9729 - DNA, 20 bp, Homo sapiens
tccattattgaggaggattt

SEQ ID NO: 9730 - DNA, 20 bp, Homo sapiens
gatttgggtagtttccagtt

SEQ ID NO: 9731 - DNA, 20 bp, Homo sapiens
tattcataatagctccaaac

SEQ ID NO: 9732 - DNA, 20 bp, Homo sapiens
aaaagtgctagaatgttcat

SEQ ID NO: 9733 - DNA, 20 bp, Homo sapiens
cattctagcacttttatttt

SEQ ID NO: 9734 - DNA, 20 bp, Homo sapiens
aattcaacaatttcacttct

SEQ ID NO: 9735 - DNA, 20 bp, Homo sapiens
attcacacagtcagctttag

SEQ ID NO: 9736 - DNA, 20 bp, Homo sapiens
tacactactggtgattagat

SEQ ID NO: 9737 - DNA, 20 bp, Homo sapiens
aaggagcttctatacactac

SEQ ID NO: 9738 - DNA, 20 bp, Homo sapiens
ttggcaaaatgtggagtaaa

SEQ ID NO: 9739 - DNA, 20 bp, Homo sapiens
caccaagtgttggcaaaatg

SEQ ID NO: 9740 - DNA, 20 bp, Homo sapiens
ctccacattttgccaacact

SEQ ID NO: 9741 - DNA, 20 bp, Homo sapiens
agaaggaaaacaccaagtgt

SEQ ID NO: 9742 - DNA, 20 bp, Homo sapiens
taaatgactaatcaaaaaga

SEQ ID NO: 9743 - DNA, 20 bp, Homo sapiens
gatatcaaaatgtaaacaat

SEQ ID NO: 9744 - DNA, 20 bp, Homo sapiens
tgctccatttagttagttat

SEQ ID NO: 9745 - DNA, 20 bp, Homo sapiens
atctccaataactaactaaa

SEQ ID NO: 9746 - DNA, 20 bp, Homo sapiens
agcacttttaatatgctttt

SEQ ID NO: 9747 - DNA, 20 bp, Homo sapiens
agaacaccacaatagaaaat

SEQ ID NO: 9748 - DNA, 20 bp, Homo sapiens
cagaacaccacaatagaaaa

SEQ ID NO: 9749 - DNA, 20 bp, Homo sapiens
agtttgcccattttctattg

SEQ ID NO: 9750 - DNA, 20 bp, Homo sapiens
tctttttcttattgatttgt

SEQ ID NO: 9751 - DNA, 20 bp, Homo sapiens
attcatatccaggatacgta

SEQ ID NO: 9752 - DNA, 20 bp, Homo sapiens
taggaattccttacgtatcc

SEQ ID NO: 9753 - DNA, 20 bp, Homo sapiens
acaaagtgggattcatatcc

SEQ ID NO: 9754 - DNA, 20 bp, Homo sapiens
aaaaaggtaacgcacaaagt

SEQ ID NO: 9755 - DNA, 20 bp, Homo sapiens
gaaaaaggtaacgcacaaag

SEQ ID NO: 9756 - DNA, 20 bp, Homo sapiens
aaagaaagaaagaaggaaaa

SEQ ID NO: 9757 - DNA, 20 bp, Homo sapiens
gtttcaaaaagaaagaaaga

SEQ ID NO: 9758 - DNA, 20 bp, Homo sapiens
attccagcctgggtgacaga

SEQ ID NO: 9759 - DNA, 20 bp, Homo sapiens
agagtctccttctgtcaccc

SEQ ID NO: 9760 - DNA, 20 bp, Homo sapiens
tctccttctgtcacccaggc

SEQ ID NO: 9761 - DNA, 20 bp, Homo sapiens
gcgccactgcattccagcct

SEQ ID NO: 9762 - DNA, 20 bp, Homo sapiens
agcgccactgcattccagcc

SEQ ID NO: 9763 - DNA, 20 bp, Homo sapiens
tcacccaggctggaatgcag

SEQ ID NO: 9764 - DNA, 20 bp, Homo sapiens
tgggaggcagaggttgtagt

SEQ ID NO: 9765 - DNA, 20 bp, Homo sapiens
ctgggaggcagaggttgtag

SEQ ID NO: 9766 - DNA, 20 bp, Homo sapiens
tgcttgaagctgggaggcag

SEQ ID NO: 9767 - DNA, 20 bp, Homo sapiens
gagaattgcttgaagctggg

SEQ ID NO: 9768 - DNA, 20 bp, Homo sapiens
tatgagaattgcttgaagct

SEQ ID NO: 9769 - DNA, 20 bp, Homo sapiens
gtatgagaattgcttgaagc

SEQ ID NO: 9770 - DNA, 20 bp, Homo sapiens
tgtaatctaagctactcagg

SEQ ID NO: 9771 - DNA, 20 bp, Homo sapiens
gcctgtaatctaagctactc

SEQ ID NO: 9772 - DNA, 20 bp, Homo sapiens
tcctgagtagcttagattac

SEQ ID NO: 9773 - DNA, 20 bp, Homo sapiens
cagaagttagctgggcatgg

SEQ ID NO: 9774 - DNA, 20 bp, Homo sapiens
atacagaagttagctgggca

SEQ ID NO: 9775 - DNA, 20 bp, Homo sapiens
tgtctatacagaagttagct

SEQ ID NO: 9776 - DNA, 20 bp, Homo sapiens
ttgtctatacagaagttagc

SEQ ID NO: 9777 - DNA, 20 bp, Homo sapiens
tgtatagacaaaataatttt

SEQ ID NO: 9778 - DNA, 20 bp, Homo sapiens
aaataatttttggtagagac

SEQ ID NO: 9779 - DNA, 20 bp, Homo sapiens
aataatttttggtagagaca

SEQ ID NO: 9780 - DNA, 20 bp, Homo sapiens
gagacagggttttgccatgt

SEQ ID NO: 9781 - DNA, 20 bp, Homo sapiens
caagatcagcctgtccaaca

SEQ ID NO: 9782 - DNA, 20 bp, Homo sapiens
agggttttgccatgttggac

SEQ ID NO: 9783 - DNA, 20 bp, Homo sapiens
catgttggacaggctgatct

SEQ ID NO: 9784 - DNA, 20 bp, Homo sapiens
acaggctgatcttggactcc

SEQ ID NO: 9785 - DNA, 20 bp, Homo sapiens
ggtgggccaaagttgaggcc

SEQ ID NO: 9786 - DNA, 20 bp, Homo sapiens
tggactcctggcctcaactt

SEQ ID NO: 9787 - DNA, 20 bp, Homo sapiens
gccaaggtgggccaaagttg

SEQ ID NO: 9788 - DNA, 20 bp, Homo sapiens
gcctcaactttggcccacct

SEQ ID NO: 9789 - DNA, 20 bp, Homo sapiens
gcactttgggaggccaaggt

SEQ ID NO: 9790 - DNA, 20 bp, Homo sapiens
ggcactttgggaggccaagg

SEQ ID NO: 9791 - DNA, 20 bp, Homo sapiens
cctggcactttgggaggcca

SEQ ID NO: 9792 - DNA, 20 bp, Homo sapiens
tgtaatcctggcactttggg

SEQ ID NO: 9793 - DNA, 20 bp, Homo sapiens
acctgtaatcctggcacttt

SEQ ID NO: 9794 - DNA, 20 bp, Homo sapiens
cacctgtaatcctggcactt

SEQ ID NO: 9795 - DNA, 20 bp, Homo sapiens
ccttggcctcccaaagtgcc

SEQ ID NO: 9796 - DNA, 20 bp, Homo sapiens
gtggctcacacctgtaatcc

SEQ ID NO: 9797 - DNA, 20 bp, Homo sapiens
tcccaaagtgccaggattac

SEQ ID NO: 9798 - DNA, 20 bp, Homo sapiens
aaaaggtgggctgggcatgg

SEQ ID NO: 9799 - DNA, 20 bp, Homo sapiens
agtaaaaggtgggctgggca

SEQ ID NO: 9800 - DNA, 20 bp, Homo sapiens
aagaaagtaaaaggtgggct

SEQ ID NO: 9801 - DNA, 20 bp, Homo sapiens
taagaaagtaaaaggtgggc

SEQ ID NO: 9802 - DNA, 20 bp, Homo sapiens
ccattaagaaagtaaaaggt

SEQ ID NO: 9803 - DNA, 20 bp, Homo sapiens
accattaagaaagtaaaagg

SEQ ID NO: 9804 - DNA, 20 bp, Homo sapiens
gacaccattaagaaagtaaa

SEQ ID NO: 9805 - DNA, 20 bp, Homo sapiens
cccaccttttactttcttaa

SEQ ID NO: 9806 - DNA, 20 bp, Homo sapiens
tggtgtcttttgaacaagag

SEQ ID NO: 9807 - DNA, 20 bp, Homo sapiens
aaagggaacaatgataaatt

SEQ ID NO: 9808 - DNA, 20 bp, Homo sapiens
taaagggaacaatgataaat

SEQ ID NO: 9809 - DNA, 20 bp, Homo sapiens
ataaaagaactaaacataaa

SEQ ID NO: 9810 - DNA, 20 bp, Homo sapiens
cataaaagaactaaacataa

SEQ ID NO: 9811 - DNA, 20 bp, Homo sapiens
ggctgcaaaaattcttaaaa

SEQ ID NO: 9812 - DNA, 20 bp, Homo sapiens
aagaatttttgcagccagcg

SEQ ID NO: 9813 - DNA, 20 bp, Homo sapiens
aatttttgcagccagcgcgg

SEQ ID NO: 9814 - DNA, 20 bp, Homo sapiens
acaggtgtgagccaccgcgc

SEQ ID NO: 9815 - DNA, 20 bp, Homo sapiens
tcccaaagtgctgggattac

SEQ ID NO: 9816 - DNA, 20 bp, Homo sapiens
cctcagcctcccaaagtgct

SEQ ID NO: 9817 - DNA, 20 bp, Homo sapiens
cacctgtaatcccagcactt

SEQ ID NO: 9818 - DNA, 20 bp, Homo sapiens
gcctcagcctcccaaagtgc

SEQ ID NO: 9819 - DNA, 20 bp, Homo sapiens
acctgtaatcccagcacttt

SEQ ID NO: 9820 - DNA, 20 bp, Homo sapiens
tgtaatcccagcactttggg

SEQ ID NO: 9821 - DNA, 20 bp, Homo sapiens
cccagcactttgggaggctg

SEQ ID NO: 9822 - DNA, 20 bp, Homo sapiens
gcactttgggaggctgaggc

SEQ ID NO: 9823 - DNA, 20 bp, Homo sapiens
ctttgggaggctgaggctgg

SEQ ID NO: 9824 - DNA, 20 bp, Homo sapiens
gctgaggctggcggatcaca

SEQ ID NO: 9825 - DNA, 20 bp, Homo sapiens
tcaagagatcgagatcatcc

SEQ ID NO: 9826 - DNA, 20 bp, Homo sapiens
agggcttcaccatgttggcc

SEQ ID NO: 9827 - DNA, 20 bp, Homo sapiens
cgagatcatcctggccaaca

SEQ ID NO: 9828 - DNA, 20 bp, Homo sapiens
ggcacagggcttcaccatgt

SEQ ID NO: 9829 - DNA, 20 bp, Homo sapiens
ttgtatttttagtaggcaca

SEQ ID NO: 9830 - DNA, 20 bp, Homo sapiens
tttgtatttttagtaggcac

SEQ ID NO: 9831 - DNA, 20 bp, Homo sapiens
taattttttgtatttttagt

SEQ ID NO: 9832 - DNA, 20 bp, Homo sapiens
taaaaatacaaaaaattagc

SEQ ID NO: 9833 - DNA, 20 bp, Homo sapiens
aaaaatacaaaaaattagct

SEQ ID NO: 9834 - DNA, 20 bp, Homo sapiens
aaaaaattagctgggcgttg

SEQ ID NO: 9835 - DNA, 20 bp, Homo sapiens
tcccgagtagctgagactac

SEQ ID NO: 9836 - DNA, 20 bp, Homo sapiens
tgcctgtagtctcagctact

SEQ ID NO: 9837 - DNA, 20 bp, Homo sapiens
gcctgtagtctcagctactc

SEQ ID NO: 9838 - DNA, 20 bp, Homo sapiens
tgtagtctcagctactcggg

SEQ ID NO: 9839 - DNA, 20 bp, Homo sapiens
gtcaccaggctggagtgcag

SEQ ID NO: 9840 - DNA, 20 bp, Homo sapiens
cacgccactgcactccagcc

SEQ ID NO: 9841 - DNA, 20 bp, Homo sapiens
gtcttgctgtgtcaccaggc

SEQ ID NO: 9842 - DNA, 20 bp, Homo sapiens
tggagtcttgctgtgtcacc

SEQ ID NO: 9843 - DNA, 20 bp, Homo sapiens
aaaaaaatttttttttgaga

SEQ ID NO: 9844 - DNA, 20 bp, Homo sapiens
aaaaaaaaattttttttgca

SEQ ID NO: 9845 - DNA, 20 bp, Homo sapiens
tttttaggaaaaaaatcagg

SEQ ID NO: 9846 - DNA, 20 bp, Homo sapiens
atttttaggaaaaaaatcag

SEQ ID NO: 9847 - DNA, 20 bp, Homo sapiens
gatttttaggaaaaaaatca

SEQ ID NO: 9848 - DNA, 20 bp, Homo sapiens
tgatttttaggaaaaaaatc

SEQ ID NO: 9849 - DNA, 20 bp, Homo sapiens
tctaataataagtgattttt

SEQ ID NO: 9850 - DNA, 20 bp, Homo sapiens
attcaacaaatatttccctg

SEQ ID NO: 9851 - DNA, 20 bp, Homo sapiens
ttcaggttatcaaaacctca

SEQ ID NO: 9852 - DNA, 20 bp, Homo sapiens
gttcaggttatcaaaacctc

SEQ ID NO: 9853 - DNA, 20 bp, Homo sapiens
cccagctccaaacacagttc

SEQ ID NO: 9854 - DNA, 20 bp, Homo sapiens
ttgataacctgaactgtgtt

SEQ ID NO: 9855 - DNA, 20 bp, Homo sapiens
acctgaactgtgtttggagc

SEQ ID NO: 9856 - DNA, 20 bp, Homo sapiens
cctgaactgtgtttggagct

SEQ ID NO: 9857 - DNA, 20 bp, Homo sapiens
ctgaactgtgtttggagctg

SEQ ID NO: 9858 - DNA, 20 bp, Homo sapiens
aactgtgtttggagctgggg

SEQ ID NO: 9859 - DNA, 20 bp, Homo sapiens
ctattgaagatatacaaaga

SEQ ID NO: 9860 - DNA, 20 bp, Homo sapiens
atacaaagatggcaaagatg

SEQ ID NO: 9861 - DNA, 20 bp, Homo sapiens
tacaaagatggcaaagatga

SEQ ID NO: 9862 - DNA, 20 bp, Homo sapiens
agatggcaaagatgagggcc

SEQ ID NO: 9863 - DNA, 20 bp, Homo sapiens
ccttccgtgtggcaagctcc

SEQ ID NO: 9864 - DNA, 20 bp, Homo sapiens
agggcctggagcttgccaca

SEQ ID NO: 9865 - DNA, 20 bp, Homo sapiens
cctggagcttgccacacgga

SEQ ID NO: 9866 - DNA, 20 bp, Homo sapiens
cagccatccccccttccgtg

SEQ ID NO: 9867 - DNA, 20 bp, Homo sapiens
ctggagcttgccacacggaa

SEQ ID NO: 9868 - DNA, 20 bp, Homo sapiens
tggagcttgccacacggaag

SEQ ID NO: 9869 - DNA, 20 bp, Homo sapiens
ggagcttgccacacggaagg

SEQ ID NO: 9870 - DNA, 20 bp, Homo sapiens
gagcttgccacacggaaggg

SEQ ID NO: 9871 - DNA, 20 bp, Homo sapiens
ttgccacacggaagggggga

SEQ ID NO: 9872 - DNA, 20 bp, Homo sapiens
aggggggatggctgcctgaa

SEQ ID NO: 9873 - DNA, 20 bp, Homo sapiens
aactacctgcccaaccattc

SEQ ID NO: 9874 - DNA, 20 bp, Homo sapiens
gggatggctgcctgaatggt

SEQ ID NO: 9875 - DNA, 20 bp, Homo sapiens
ggatggctgcctgaatggtt

SEQ ID NO: 9876 - DNA, 20 bp, Homo sapiens
ggctgcctgaatggttgggc

SEQ ID NO: 9877 - DNA, 20 bp, Homo sapiens
gccaccctgctgctcatgta

SEQ ID NO: 9878 - DNA, 20 bp, Homo sapiens
tgccaccctgctgctcatgt

SEQ ID NO: 9879 - DNA, 20 bp, Homo sapiens
gcactccctacatgagcagc

SEQ ID NO: 9880 - DNA, 20 bp, Homo sapiens
cactccctacatgagcagca

SEQ ID NO: 9881 - DNA, 20 bp, Homo sapiens
tccctacatgagcagcaggg

SEQ ID NO: 9882 - DNA, 20 bp, Homo sapiens
ttctttttttttttttgaga

SEQ ID NO: 9883 - DNA, 20 bp, Homo sapiens
ggagtctcgctgtgttgccc

SEQ ID NO: 9884 - DNA, 20 bp, Homo sapiens
tctcgctgtgttgcccaggc

SEQ ID NO: 9885 - DNA, 20 bp, Homo sapiens
acgccactgcactccagcct

SEQ ID NO: 9886 - DNA, 20 bp, Homo sapiens
cacgccactgcactccagcc

SEQ ID NO: 9887 - DNA, 20 bp, Homo sapiens
ttgcccaggctggagtgcag

SEQ ID NO: 9888 - DNA, 20 bp, Homo sapiens
cactgcaaactccacctccc

SEQ ID NO: 9889 - DNA, 20 bp, Homo sapiens
aacggcgtgaacctgggagg

SEQ ID NO: 9890 - DNA, 20 bp, Homo sapiens
gagaacggcgtgaacctggg

SEQ ID NO: 9891 - DNA, 20 bp, Homo sapiens
caggagaacggcgtgaacct

SEQ ID NO: 9892 - DNA, 20 bp, Homo sapiens
gcaggagaacggcgtgaacc

SEQ ID NO: 9893 - DNA, 20 bp, Homo sapiens
aggaggctgaggcaggagaa

SEQ ID NO: 9894 - DNA, 20 bp, Homo sapiens
gctactcaggaggctgaggc

SEQ ID NO: 9895 - DNA, 20 bp, Homo sapiens
cccagctactcaggaggctg

SEQ ID NO: 9896 - DNA, 20 bp, Homo sapiens
tgtagtcccagctactcagg

SEQ ID NO: 9897 - DNA, 20 bp, Homo sapiens
gcctgtagtcccagctactc

SEQ ID NO: 9898 - DNA, 20 bp, Homo sapiens
gcctcagcctcctgagtagc

SEQ ID NO: 9899 - DNA, 20 bp, Homo sapiens
cctcagcctcctgagtagct

SEQ ID NO: 9900 - DNA, 20 bp, Homo sapiens
tcctgagtagctgggactac

SEQ ID NO: 9901 - DNA, 20 bp, Homo sapiens
cattagccgggagtggtggc

SEQ ID NO: 9902 - DNA, 20 bp, Homo sapiens
aaaacattagccgggagtgg

SEQ ID NO: 9903 - DNA, 20 bp, Homo sapiens
caggcgcctgccaccactcc

SEQ ID NO: 9904 - DNA, 20 bp, Homo sapiens
tacaaaacattagccgggag

SEQ ID NO: 9905 - DNA, 20 bp, Homo sapiens
aaaaatacaaaacattagcc

SEQ ID NO: 9906 - DNA, 20 bp, Homo sapiens
taaaaatacaaaacattagc

SEQ ID NO: 9907 - DNA, 20 bp, Homo sapiens
ttttgtatttttagtagaga

SEQ ID NO: 9908 - DNA, 20 bp, Homo sapiens
tttgtatttttagtagagaa

SEQ ID NO: 9909 - DNA, 20 bp, Homo sapiens
ttgtatttttagtagagaag

SEQ ID NO: 9910 - DNA, 20 bp, Homo sapiens
ggggtttcactgtgttagcc

SEQ ID NO: 9911 - DNA, 20 bp, Homo sapiens
tttcactgtgttagccagga

SEQ ID NO: 9912 - DNA, 20 bp, Homo sapiens
tcaggagatggagaccatcc

SEQ ID NO: 9913 - DNA, 20 bp, Homo sapiens
cagatcatgaggtcaggaga

SEQ ID NO: 9914 - DNA, 20 bp, Homo sapiens
ggcgggcagatcatgaggtc

SEQ ID NO: 9915 - DNA, 20 bp, Homo sapiens
gccgaggcgggcagatcatg

SEQ ID NO: 9916 - DNA, 20 bp, Homo sapiens
acctcatgatctgcccgcct

SEQ ID NO: 9917 - DNA, 20 bp, Homo sapiens
acactttgggaggccgaggc

SEQ ID NO: 9918 - DNA, 20 bp, Homo sapiens
cacactttgggaggccgagg

SEQ ID NO: 9919 - DNA, 20 bp, Homo sapiens
ccccacactttgggaggccg

SEQ ID NO: 9920 - DNA, 20 bp, Homo sapiens
tgtaatccccacactttggg

SEQ ID NO: 9921 - DNA, 20 bp, Homo sapiens
cgcctcggcctcccaaagtg

SEQ ID NO: 9922 - DNA, 20 bp, Homo sapiens
acctgtaatccccacacttt

SEQ ID NO: 9923 - DNA, 20 bp, Homo sapiens
gcctcggcctcccaaagtgt

SEQ ID NO: 9924 - DNA, 20 bp, Homo sapiens
cacctgtaatccccacactt

SEQ ID NO: 9925 - DNA, 20 bp, Homo sapiens
cctcggcctcccaaagtgtg

SEQ ID NO: 9926 - DNA, 20 bp, Homo sapiens
tcccaaagtgtggggattac

SEQ ID NO: 9927 - DNA, 20 bp, Homo sapiens
taaattaaggccgggtgtgg

SEQ ID NO: 9928 - DNA, 20 bp, Homo sapiens
caggtgtgagccaccacacc

SEQ ID NO: 9929 - DNA, 20 bp, Homo sapiens
aaataaattaaggccgggtg

SEQ ID NO: 9930 - DNA, 20 bp, Homo sapiens
tagaaaaataaattaaggcc

SEQ ID NO: 9931 - DNA, 20 bp, Homo sapiens
ctagaaaaataaattaaggc

SEQ ID NO: 9932 - DNA, 20 bp, Homo sapiens
cagactagaaaaataaatta

SEQ ID NO: 9933 - DNA, 20 bp, Homo sapiens
aatttatttttctagtctgc

SEQ ID NO: 9934 - DNA, 20 bp, Homo sapiens
ctcataagatcataggagag

SEQ ID NO: 9935 - DNA, 20 bp, Homo sapiens
tccctacctcataagatcat

SEQ ID NO: 9936 - DNA, 20 bp, Homo sapiens
cactctcctatgatcttatg

SEQ ID NO: 9937 - DNA, 20 bp, Homo sapiens
ctcctatgatcttatgaggt

SEQ ID NO: 9938 - DNA, 20 bp, Homo sapiens
tcctatgatcttatgaggta

SEQ ID NO: 9939 - DNA, 20 bp, Homo sapiens
ctgattgttcattataaagt

SEQ ID NO: 9940 - DNA, 20 bp, Homo sapiens
actgattgttcattataaag

SEQ ID NO: 9941 - DNA, 20 bp, Homo sapiens
aatgaacaatcagtaaagac

SEQ ID NO: 9942 - DNA, 20 bp, Homo sapiens
atgaacaatcagtaaagaca

SEQ ID NO: 9943 - DNA, 20 bp, Homo sapiens
accccaccttgtatgtcatt

SEQ ID NO: 9944 - DNA, 20 bp, Homo sapiens
agataaccaaatgacataca

SEQ ID NO: 9945 - DNA, 20 bp, Homo sapiens
taaccaaatgacatacaagg

SEQ ID NO: 9946 - DNA, 20 bp, Homo sapiens
aaccaaatgacatacaaggt

SEQ ID NO: 9947 - DNA, 20 bp, Homo sapiens
accaaatgacatacaaggtg

SEQ ID NO: 9948 - DNA, 20 bp, Homo sapiens
aagcctgcagcctcatgggg

SEQ ID NO: 9949 - DNA, 20 bp, Homo sapiens
aaggtggggtccaccccatg

SEQ ID NO: 9950 - DNA, 20 bp, Homo sapiens
tccaagcctgcagcctcatg

SEQ ID NO: 9951 - DNA, 20 bp, Homo sapiens
ctccaagcctgcagcctcat

SEQ ID NO: 9952 - DNA, 20 bp, Homo sapiens
gctccaagcctgcagcctca

SEQ ID NO: 9953 - DNA, 20 bp, Homo sapiens
ggtccaccccatgaggctgc

SEQ ID NO: 9954 - DNA, 20 bp, Homo sapiens
accccatgaggctgcaggct

SEQ ID NO: 9955 - DNA, 20 bp, Homo sapiens
tgtttcttgtctcaacaggt

SEQ ID NO: 9956 - DNA, 20 bp, Homo sapiens
ctgtttcttgtctcaacagg

SEQ ID NO: 9957 - DNA, 20 bp, Homo sapiens
ttcctgtttcttgtctcaac

SEQ ID NO: 9958 - DNA, 20 bp, Homo sapiens
cacctgttgagacaagaaac

SEQ ID NO: 9959 - DNA, 20 bp, Homo sapiens
gttgagacaagaaacaggaa

SEQ ID NO: 9960 - DNA, 20 bp, Homo sapiens
acaggaaaggcttaaaaaac

SEQ ID NO: 9961 - DNA, 20 bp, Homo sapiens
ttgttatgtacaactatccg

SEQ ID NO: 9962 - DNA, 20 bp, Homo sapiens
tgttatgtacaactatccgt

SEQ ID NO: 9963 - DNA, 20 bp, Homo sapiens
gttatgtacaactatccgtg

SEQ ID NO: 9964 - DNA, 20 bp, Homo sapiens
gcccgttcactgcagcccca

SEQ ID NO: 9965 - DNA, 20 bp, Homo sapiens
atccgtggggctgcagtgaa

SEQ ID NO: 9966 - DNA, 20 bp, Homo sapiens
tccgtggggctgcagtgaac

SEQ ID NO: 9967 - DNA, 20 bp, Homo sapiens
tggggctgcagtgaacgggc

SEQ ID NO: 9968 - DNA, 20 bp, Homo sapiens
tgaacgggctggcagtgccc

SEQ ID NO: 9969 - DNA, 20 bp, Homo sapiens
ggctggcagtgcccaggtgc

SEQ ID NO: 9970 - DNA, 20 bp, Homo sapiens
ccagggttcagcctgcacct

SEQ ID NO: 9971 - DNA, 20 bp, Homo sapiens
cccagggttcagcctgcacc

SEQ ID NO: 9972 - DNA, 20 bp, Homo sapiens
cccaggtgcaggctgaaccc

SEQ ID NO: 9973 - DNA, 20 bp, Homo sapiens
ccaggtgcaggctgaaccct

SEQ ID NO: 9974 - DNA, 20 bp, Homo sapiens
tgctgaatgtgattgtccca

SEQ ID NO: 9975 - DNA, 20 bp, Homo sapiens
atgctgaatgtgattgtccc

SEQ ID NO: 9976 - DNA, 20 bp, Homo sapiens
acaatcacattcagcatcca

SEQ ID NO: 9977 - DNA, 20 bp, Homo sapiens
caatcacattcagcatccaa

SEQ ID NO: 9978 - DNA, 20 bp, Homo sapiens
taagctattacgggggccct

SEQ ID NO: 9979 - DNA, 20 bp, Homo sapiens
caaacattaagctattacgg

SEQ ID NO: 9980 - DNA, 20 bp, Homo sapiens
tcaaacattaagctattacg

SEQ ID NO: 9981 - DNA, 20 bp, Homo sapiens
ttcaaacattaagctattac

SEQ ID NO: 9982 - DNA, 20 bp, Homo sapiens
attcaaacattaagctatta

SEQ ID NO: 9983 - DNA, 20 bp, Homo sapiens
taatgtttgaattgaacccc

SEQ ID NO: 9984 - DNA, 20 bp, Homo sapiens
aatgtttgaattgaacccct

SEQ ID NO: 9985 - DNA, 20 bp, Homo sapiens
atgtttgaattgaacccctg

SEQ ID NO: 9986 - DNA, 20 bp, Homo sapiens
ctccttcaaggcaaccccag

SEQ ID NO: 9987 - DNA, 20 bp, Homo sapiens
tctccttcaaggcaacccca

SEQ ID NO: 9988 - DNA, 20 bp, Homo sapiens
ctctccttcaaggcaacccc

SEQ ID NO: 9989 - DNA, 20 bp, Homo sapiens
aacccctggggttgccttga

SEQ ID NO: 9990 - DNA, 20 bp, Homo sapiens
tccacgacctctctccttca

SEQ ID NO: 9991 - DNA, 20 bp, Homo sapiens
ggggttgccttgaaggagag

SEQ ID NO: 9992 - DNA, 20 bp, Homo sapiens
gccttgaaggagagaggtcg

SEQ ID NO: 9993 - DNA, 20 bp, Homo sapiens
aggtcgtggaagtatgttca

SEQ ID NO: 9994 - DNA, 20 bp, Homo sapiens
ggtcgtggaagtatgttcaa

SEQ ID NO: 9995 - DNA, 20 bp, Homo sapiens
gtcgtggaagtatgttcaag

SEQ ID NO: 9996 - DNA, 20 bp, Homo sapiens
tggaagtatgttcaaggggt

SEQ ID NO: 9997 - DNA, 20 bp, Homo sapiens
ggaagtatgttcaaggggta

SEQ ID NO: 9998 - DNA, 20 bp, Homo sapiens
gtatgttcaaggggtaggga

SEQ ID NO: 9999 - DNA, 20 bp, Homo sapiens
tatgttcaaggggtagggat

SEQ ID NO: 10000 - DNA, 20 bp, Homo sapiens
ttcaaggggtagggatgggc

SEQ ID NO: 10001 - DNA, 20 bp, Homo sapiens
tcaaggggtagggatgggca

SEQ ID NO: 10002 - DNA, 20 bp, Homo sapiens
caaggggtagggatgggcag

SEQ ID NO: 10003 - DNA, 20 bp, Homo sapiens
gtagggatgggcaggggaga

SEQ ID NO: 10004 - DNA, 20 bp, Homo sapiens
tagggatgggcaggggagat

SEQ ID NO: 10005 - DNA, 20 bp, Homo sapiens
aaggtgggtggggtagagct

SEQ ID NO: 10006 - DNA, 20 bp, Homo sapiens
ctcttggggcaaggtgggtg

SEQ ID NO: 10007 - DNA, 20 bp, Homo sapiens
tctcttggggcaaggtgggt

SEQ ID NO: 10008 - DNA, 20 bp, Homo sapiens
ttctcttggggcaaggtggg

SEQ ID NO: 10009 - DNA, 20 bp, Homo sapiens
tatttctcttggggcaaggt

SEQ ID NO: 10010 - DNA, 20 bp, Homo sapiens
ctatttctcttggggcaagg

SEQ ID NO: 10011 - DNA, 20 bp, Homo sapiens
gttctatttctcttggggca

SEQ ID NO: 10012 - DNA, 20 bp, Homo sapiens
tgaaggttctatttctcttg

SEQ ID NO: 10013 - DNA, 20 bp, Homo sapiens
atgaaggttctatttctctt

SEQ ID NO: 10014 - DNA, 20 bp, Homo sapiens
gatgaaggttctatttctct

SEQ ID NO: 10015 - DNA, 20 bp, Homo sapiens
cgttaggcaattaaagatga

SEQ ID NO: 10016 - DNA, 20 bp, Homo sapiens
ccagccccagttttctcgtt

SEQ ID NO: 10017 - DNA, 20 bp, Homo sapiens
taattgcctaacgagaaaac

SEQ ID NO: 10018 - DNA, 20 bp, Homo sapiens
aattgcctaacgagaaaact

SEQ ID NO: 10019 - DNA, 20 bp, Homo sapiens
attgcctaacgagaaaactg

SEQ ID NO: 10020 - DNA, 20 bp, Homo sapiens
cctaacgagaaaactggggc

SEQ ID NO: 10021 - DNA, 20 bp, Homo sapiens
aaactggggctggccagatg

SEQ ID NO: 10022 - DNA, 20 bp, Homo sapiens
cagacatgagccaccacatc

SEQ ID NO: 10023 - DNA, 20 bp, Homo sapiens
ctggggctggccagatgtgg

SEQ ID NO: 10024 - DNA, 20 bp, Homo sapiens
cctcggcctcccaaagtgct

SEQ ID NO: 10025 - DNA, 20 bp, Homo sapiens
tgtctgtaatcccagcactt

SEQ ID NO: 10026 - DNA, 20 bp, Homo sapiens
gcctcggcctcccaaagtgc

SEQ ID NO: 10027 - DNA, 20 bp, Homo sapiens
gtctgtaatcccagcacttt

SEQ ID NO: 10028 - DNA, 20 bp, Homo sapiens
tgtaatcccagcactttggg

SEQ ID NO: 10029 - DNA, 20 bp, Homo sapiens
cccagcactttgggaggccg

SEQ ID NO: 10030 - DNA, 20 bp, Homo sapiens
agcactttgggaggccgagg

SEQ ID NO: 10031 - DNA, 20 bp, Homo sapiens
gcactttgggaggccgaggc

SEQ ID NO: 10032 - DNA, 20 bp, Homo sapiens
ctcaagtgatctgcccgcct

SEQ ID NO: 10033 - DNA, 20 bp, Homo sapiens
cgaggcgggcagatcacttg

SEQ ID NO: 10034 - DNA, 20 bp, Homo sapiens
cgggcagatcacttgaggtc

SEQ ID NO: 10035 - DNA, 20 bp, Homo sapiens
tcaggagttcgagatcaccc

SEQ ID NO: 10036 - DNA, 20 bp, Homo sapiens
gggtttcaccatgttgacca

SEQ ID NO: 10037 - DNA, 20 bp, Homo sapiens
ggggtttcaccatgttgacc

SEQ ID NO: 10038 - DNA, 20 bp, Homo sapiens
cgagatcaccctggtcaaca

SEQ ID NO: 10039 - DNA, 20 bp, Homo sapiens
ttgtattattaatagagacg

SEQ ID NO: 10040 - DNA, 20 bp, Homo sapiens
tttgtattattaatagagac

SEQ ID NO: 10041 - DNA, 20 bp, Homo sapiens
ttttgtattattaatagaga

SEQ ID NO: 10042 - DNA, 20 bp, Homo sapiens
taataatacaaaaattatcc

SEQ ID NO: 10043 - DNA, 20 bp, Homo sapiens
atacaaaaattatccaggta

SEQ ID NO: 10044 - DNA, 20 bp, Homo sapiens
caggcatgcgccaccatacc

SEQ ID NO: 10045 - DNA, 20 bp, Homo sapiens
caaaaattatccaggtatgg

SEQ ID NO: 10046 - DNA, 20 bp, Homo sapiens
cctcaagtagctgggactac

SEQ ID NO: 10047 - DNA, 20 bp, Homo sapiens
ttcttgtgcctcaagtagct

SEQ ID NO: 10048 - DNA, 20 bp, Homo sapiens
attcttgtgcctcaagtagc

SEQ ID NO: 10049 - DNA, 20 bp, Homo sapiens
cctgtagtcccagctacttg

SEQ ID NO: 10050 - DNA, 20 bp, Homo sapiens
gcacaagaatcgcttgaacc

SEQ ID NO: 10051 - DNA, 20 bp, Homo sapiens
cacaagaatcgcttgaacct

SEQ ID NO: 10052 - DNA, 20 bp, Homo sapiens
acaagaatcgcttgaacctg

SEQ ID NO: 10053 - DNA, 20 bp, Homo sapiens
caagaatcgcttgaacctgg

SEQ ID NO: 10054 - DNA, 20 bp, Homo sapiens
cactgcaacctctgtccccc

SEQ ID NO: 10055 - DNA, 20 bp, Homo sapiens
cgcttgaacctgggggacag

SEQ ID NO: 10056 - DNA, 20 bp, Homo sapiens
ccagactggagtgcagtggt

SEQ ID NO: 10057 - DNA, 20 bp, Homo sapiens
tcgtccagactggagtgcag

SEQ ID NO: 10058 - DNA, 20 bp, Homo sapiens
ccgaccactgcactccagtc

SEQ ID NO: 10059 - DNA, 20 bp, Homo sapiens
tctcactctgtcgtccagac

SEQ ID NO: 10060 - DNA, 20 bp, Homo sapiens
ttctgtttttgtttgtgaga

SEQ ID NO: 10061 - DNA, 20 bp, Homo sapiens
aaaagagagagagagaaaac

SEQ ID NO: 10062 - DNA, 20 bp, Homo sapiens
agagagagagagaaaactgg

SEQ ID NO: 10063 - DNA, 20 bp, Homo sapiens
agaaaactggaggctctgag

SEQ ID NO: 10064 - DNA, 20 bp, Homo sapiens
ctggaggctctgagaggttg

SEQ ID NO: 10065 - DNA, 20 bp, Homo sapiens
tggaggctctgagaggttga

SEQ ID NO: 10066 - DNA, 20 bp, Homo sapiens
agaggttgagggacttgccc

SEQ ID NO: 10067 - DNA, 20 bp, Homo sapiens
gaggttgagggacttgccca

SEQ ID NO: 10068 - DNA, 20 bp, Homo sapiens
cttactagctgcaagaccct

SEQ ID NO: 10069 - DNA, 20 bp, Homo sapiens
acttactagctgcaagaccc

SEQ ID NO: 10070 - DNA, 20 bp, Homo sapiens
cagctagtaagtgacagagc

SEQ ID NO: 10071 - DNA, 20 bp, Homo sapiens
agctagtaagtgacagagct

SEQ ID NO: 10072 - DNA, 20 bp, Homo sapiens
acagagctgggacttgagct

SEQ ID NO: 10073 - DNA, 20 bp, Homo sapiens
cagagctgggacttgagctt

SEQ ID NO: 10074 - DNA, 20 bp, Homo sapiens
agcttgggttttctgactcc

SEQ ID NO: 10075 - DNA, 20 bp, Homo sapiens
gggttttctgactcctggtc

SEQ ID NO: 10076 - DNA, 20 bp, Homo sapiens
catggataatgaaccagacc

SEQ ID NO: 10077 - DNA, 20 bp, Homo sapiens
ggtctggttcattatccatg

SEQ ID NO: 10078 - DNA, 20 bp, Homo sapiens
ttttagttcccagcacctca

SEQ ID NO: 10079 - DNA, 20 bp, Homo sapiens
gttcattatccatgaggtgc

SEQ ID NO: 10080 - DNA, 20 bp, Homo sapiens
ttcattatccatgaggtgct

SEQ ID NO: 10081 - DNA, 20 bp, Homo sapiens
actaaaataagccacaatct

SEQ ID NO: 10082 - DNA, 20 bp, Homo sapiens
cgacggagattccaagattg

SEQ ID NO: 10083 - DNA, 20 bp, Homo sapiens
tgtgggagggagggaggcga

SEQ ID NO: 10084 - DNA, 20 bp, Homo sapiens
cagacatgtgggagggaggg

SEQ ID NO: 10085 - DNA, 20 bp, Homo sapiens
acgcagacatgtgggaggga

SEQ ID NO: 10086 - DNA, 20 bp, Homo sapiens
cacgcagacatgtgggaggg

SEQ ID NO: 10087 - DNA, 20 bp, Homo sapiens
agccacgcagacatgtggga

SEQ ID NO: 10088 - DNA, 20 bp, Homo sapiens
aagccacgcagacatgtggg

SEQ ID NO: 10089 - DNA, 20 bp, Homo sapiens
aaaaagccacgcagacatgt

SEQ ID NO: 10090 - DNA, 20 bp, Homo sapiens
caaaaagccacgcagacatg

SEQ ID NO: 10091 - DNA, 20 bp, Homo sapiens
ctccctcccacatgtctgcg

SEQ ID NO: 10092 - DNA, 20 bp, Homo sapiens
cacatgtctgcgtggctttt

SEQ ID NO: 10093 - DNA, 20 bp, Homo sapiens
acatgtctgcgtggcttttt

SEQ ID NO: 10094 - DNA, 20 bp, Homo sapiens
tggctttttgggaaaatgcc

SEQ ID NO: 10095 - DNA, 20 bp, Homo sapiens
ggctttttgggaaaatgcca

SEQ ID NO: 10096 - DNA, 20 bp, Homo sapiens
gctttttgggaaaatgccag

SEQ ID NO: 10097 - DNA, 20 bp, Homo sapiens
ccctggctggtacattcccc

SEQ ID NO: 10098 - DNA, 20 bp, Homo sapiens
gccaggggaatgtaccagcc

SEQ ID NO: 10099 - DNA, 20 bp, Homo sapiens
ccaggggaatgtaccagcca

SEQ ID NO: 10100 - DNA, 20 bp, Homo sapiens
acaagggtcctctccctggc

SEQ ID NO: 10101 - DNA, 20 bp, Homo sapiens
ggaatgtaccagccagggag

SEQ ID NO: 10102 - DNA, 20 bp, Homo sapiens
gaaaacaagggtcctctccc

SEQ ID NO: 10103 - DNA, 20 bp, Homo sapiens
aagggccatgaggaaaacaa

SEQ ID NO: 10104 - DNA, 20 bp, Homo sapiens
gaagggccatgaggaaaaca

SEQ ID NO: 10105 - DNA, 20 bp, Homo sapiens
gaggacccttgttttcctca

SEQ ID NO: 10106 - DNA, 20 bp, Homo sapiens
cattgccaggaagggccatg

SEQ ID NO: 10107 - DNA, 20 bp, Homo sapiens
gttttcctcatggcccttcc

SEQ ID NO: 10108 - DNA, 20 bp, Homo sapiens
agtagtgccattgccaggaa

SEQ ID NO: 10109 - DNA, 20 bp, Homo sapiens
cagtagtgccattgccagga

SEQ ID NO: 10110 - DNA, 20 bp, Homo sapiens
ctcatggcccttcctggcaa

SEQ ID NO: 10111 - DNA, 20 bp, Homo sapiens
gtgtcagtagtgccattgcc

SEQ ID NO: 10112 - DNA, 20 bp, Homo sapiens
tcagggacaaaaaggactgt

SEQ ID NO: 10113 - DNA, 20 bp, Homo sapiens
agaggtcatcagggacaaaa

SEQ ID NO: 10114 - DNA, 20 bp, Homo sapiens
tcaggcagcagaggtcatca

SEQ ID NO: 10115 - DNA, 20 bp, Homo sapiens
atcaggcagcagaggtcatc

SEQ ID NO: 10116 - DNA, 20 bp, Homo sapiens
acttgggcatcaggcagcag

SEQ ID NO: 10117 - DNA, 20 bp, Homo sapiens
gaggtggtcacttgggcatc

SEQ ID NO: 10118 - DNA, 20 bp, Homo sapiens
caaagcagaggtggtcactt

SEQ ID NO: 10119 - DNA, 20 bp, Homo sapiens
acaaagcagaggtggtcact

SEQ ID NO: 10120 - DNA, 20 bp, Homo sapiens
tagaaatgacaaagcagagg

SEQ ID NO: 10121 - DNA, 20 bp, Homo sapiens
tcctagaaatgacaaagcag

SEQ ID NO: 10122 - DNA, 20 bp, Homo sapiens
acctctgctttgtcatttct

SEQ ID NO: 10123 - DNA, 20 bp, Homo sapiens
tgctttgtcatttctaggat

SEQ ID NO: 10124 - DNA, 20 bp, Homo sapiens
catttctaggattggcttcc

SEQ ID NO: 10125 - DNA, 20 bp, Homo sapiens
ccccaatgctgaggaggacc

SEQ ID NO: 10126 - DNA, 20 bp, Homo sapiens
tgagttccccaatgctgagg

SEQ ID NO: 10127 - DNA, 20 bp, Homo sapiens
ttccaggtcctcctcagcat

SEQ ID NO: 10128 - DNA, 20 bp, Homo sapiens
agctgagttccccaatgctg

SEQ ID NO: 10129 - DNA, 20 bp, Homo sapiens
tccaggtcctcctcagcatt

SEQ ID NO: 10130 - DNA, 20 bp, Homo sapiens
ccaggtcctcctcagcattg

SEQ ID NO: 10131 - DNA, 20 bp, Homo sapiens
cagcattggggaactcagct

SEQ ID NO: 10132 - DNA, 20 bp, Homo sapiens
agacatgagagctatcacga

SEQ ID NO: 10133 - DNA, 20 bp, Homo sapiens
atcgtgatagctctcatgtc

SEQ ID NO: 10134 - DNA, 20 bp, Homo sapiens
ctcatgtctggtctcctgac

SEQ ID NO: 10135 - DNA, 20 bp, Homo sapiens
tggcctcacactgacctgtc

SEQ ID NO: 10136 - DNA, 20 bp, Homo sapiens
tctcctgacaggtcagtgtg

SEQ ID NO: 10137 - DNA, 20 bp, Homo sapiens
tggcaatggtggaagaaagg

SEQ ID NO: 10138 - DNA, 20 bp, Homo sapiens
tcctggcaatggtggaagaa

SEQ ID NO: 10139 - DNA, 20 bp, Homo sapiens
gtgctgtgtcctggcaatgg

SEQ ID NO: 10140 - DNA, 20 bp, Homo sapiens
acctttcttccaccattgcc

SEQ ID NO: 10141 - DNA, 20 bp, Homo sapiens
tgggtgctgtgtcctggcaa

SEQ ID NO: 10142 - DNA, 20 bp, Homo sapiens
tggacgtgggtgctgtgtcc

SEQ ID NO: 10143 - DNA, 20 bp, Homo sapiens
gcagggtgcgctctggacgt

SEQ ID NO: 10144 - DNA, 20 bp, Homo sapiens
ggcagggtgcgctctggacg

SEQ ID NO: 10145 - DNA, 20 bp, Homo sapiens
ccacacggcagggtgcgctc

SEQ ID NO: 10146 - DNA, 20 bp, Homo sapiens
agacatccagccacacggca

SEQ ID NO: 10147 - DNA, 20 bp, Homo sapiens
ccagagcgcaccctgccgtg

SEQ ID NO: 10148 - DNA, 20 bp, Homo sapiens
tagacatccagccacacggc

SEQ ID NO: 10149 - DNA, 20 bp, Homo sapiens
agcgcaccctgccgtgtggc

SEQ ID NO: 10150 - DNA, 20 bp, Homo sapiens
cacatagacatccagccaca

SEQ ID NO: 10151 - DNA, 20 bp, Homo sapiens
gatcctcagggaaggagatg

SEQ ID NO: 10152 - DNA, 20 bp, Homo sapiens
tgatcctcagggaaggagat

SEQ ID NO: 10153 - DNA, 20 bp, Homo sapiens
gtgatcctcagggaaggaga

SEQ ID NO: 10154 - DNA, 20 bp, Homo sapiens
gtgccccatctccttccctg

SEQ ID NO: 10155 - DNA, 20 bp, Homo sapiens
aattatgtgatcctcaggga

SEQ ID NO: 10156 - DNA, 20 bp, Homo sapiens
ctgaaattatgtgatcctca

SEQ ID NO: 10157 - DNA, 20 bp, Homo sapiens
tctgaaattatgtgatcctc

SEQ ID NO: 10158 - DNA, 20 bp, Homo sapiens
ggatcacataatttcagaat

SEQ ID NO: 10159 - DNA, 20 bp, Homo sapiens
acataatttcagaattggaa

SEQ ID NO: 10160 - DNA, 20 bp, Homo sapiens
agaattggaaaggttcttag

SEQ ID NO: 10161 - DNA, 20 bp, Homo sapiens
tcacagtccacattagcagc

SEQ ID NO: 10162 - DNA, 20 bp, Homo sapiens
gaggtcacctgctgctaatg

SEQ ID NO: 10163 - DNA, 20 bp, Homo sapiens
tgctgctaatgtggactgtg

SEQ ID NO: 10164 - DNA, 20 bp, Homo sapiens
ctaatgtggactgtgaggcc

SEQ ID NO: 10165 - DNA, 20 bp, Homo sapiens
taatgtggactgtgaggcca

SEQ ID NO: 10166 - DNA, 20 bp, Homo sapiens
gtggactgtgaggccagggc

SEQ ID NO: 10167 - DNA, 20 bp, Homo sapiens
tggactgtgaggccagggca

SEQ ID NO: 10168 - DNA, 20 bp, Homo sapiens
gggatgtcccttccctgccc

SEQ ID NO: 10169 - DNA, 20 bp, Homo sapiens
ctgtgaggccagggcaggga

SEQ ID NO: 10170 - DNA, 20 bp, Homo sapiens
tgtgaggccagggcagggaa

SEQ ID NO: 10171 - DNA, 20 bp, Homo sapiens
gcagggaagggacatccctg

SEQ ID NO: 10172 - DNA, 20 bp, Homo sapiens
tcaccctacttataacctca

SEQ ID NO: 10173 - DNA, 20 bp, Homo sapiens
ctcaccctacttataacctc

SEQ ID NO: 10174 - DNA, 20 bp, Homo sapiens
acatccctgaggttataagt

SEQ ID NO: 10175 - DNA, 20 bp, Homo sapiens
catccctgaggttataagta

SEQ ID NO: 10176 - DNA, 20 bp, Homo sapiens
gaggttataagtagggtgag

SEQ ID NO: 10177 - DNA, 20 bp, Homo sapiens
cgttgcagacttttgaaccc

SEQ ID NO: 10178 - DNA, 20 bp, Homo sapiens
gttgcagacttttgaaccca

SEQ ID NO: 10179 - DNA, 20 bp, Homo sapiens
cagacttttgaacccagggc

SEQ ID NO: 10180 - DNA, 20 bp, Homo sapiens
tgagtgtgatcaccagccct

SEQ ID NO: 10181 - DNA, 20 bp, Homo sapiens
ctgagtgtgatcaccagccc

SEQ ID NO: 10182 - DNA, 20 bp, Homo sapiens
ttgggtgtaaggattttctc

SEQ ID NO: 10183 - DNA, 20 bp, Homo sapiens
tttgggtgtaaggattttct

SEQ ID NO: 10184 - DNA, 20 bp, Homo sapiens
aaggtaggcttttgggtgta

SEQ ID NO: 10185 - DNA, 20 bp, Homo sapiens
gttgaataaaatagtattat

SEQ ID NO: 10186 - DNA, 20 bp, Homo sapiens
tgttgaataaaatagtatta

SEQ ID NO: 10187 - DNA, 20 bp, Homo sapiens
ccccagtgcctggctcatag

SEQ ID NO: 10188 - DNA, 20 bp, Homo sapiens
ttcaatatccactatgagcc

SEQ ID NO: 10189 - DNA, 20 bp, Homo sapiens
atccactatgagccaggcac

SEQ ID NO: 10190 - DNA, 20 bp, Homo sapiens
tccactatgagccaggcact

SEQ ID NO: 10191 - DNA, 20 bp, Homo sapiens
actgctgtgtccccagtgcc

SEQ ID NO: 10192 - DNA, 20 bp, Homo sapiens
ccactatgagccaggcactg

SEQ ID NO: 10193 - DNA, 20 bp, Homo sapiens
aggtcaattccatggggtca

SEQ ID NO: 10194 - DNA, 20 bp, Homo sapiens
aaggtcaattccatggggtc

SEQ ID NO: 10195 - DNA, 20 bp, Homo sapiens
aaacaaattccctgacccca

SEQ ID NO: 10196 - DNA, 20 bp, Homo sapiens
actagaaggtcaattccatg

SEQ ID NO: 10197 - DNA, 20 bp, Homo sapiens
cactagaaggtcaattccat

SEQ ID NO: 10198 - DNA, 20 bp, Homo sapiens
ccactagaaggtcaattcca

SEQ ID NO: 10199 - DNA, 20 bp, Homo sapiens
ccatggaattgaccttctag

SEQ ID NO: 10200 - DNA, 20 bp, Homo sapiens
catggaattgaccttctagt

SEQ ID NO: 10201 - DNA, 20 bp, Homo sapiens
taataccttcccccactaga

SEQ ID NO: 10202 - DNA, 20 bp, Homo sapiens
atggaattgaccttctagtg

SEQ ID NO: 10203 - DNA, 20 bp, Homo sapiens
tggaattgaccttctagtgg

SEQ ID NO: 10204 - DNA, 20 bp, Homo sapiens
attgaccttctagtggggga

SEQ ID NO: 10205 - DNA, 20 bp, Homo sapiens
taagtgtctactacgccaga

SEQ ID NO: 10206 - DNA, 20 bp, Homo sapiens
aagtgtctactacgccagat

SEQ ID NO: 10207 - DNA, 20 bp, Homo sapiens
cacagccacttcttcccatc

SEQ ID NO: 10208 - DNA, 20 bp, Homo sapiens
ctacgccagatgggaagaag

SEQ ID NO: 10209 - DNA, 20 bp, Homo sapiens
agagaaacatagagtcaatg

SEQ ID NO: 10210 - DNA, 20 bp, Homo sapiens
gagaaacatagagtcaatgt

SEQ ID NO: 10211 - DNA, 20 bp, Homo sapiens
aacatagagtcaatgtggga

SEQ ID NO: 10212 - DNA, 20 bp, Homo sapiens
acatagagtcaatgtgggat

SEQ ID NO: 10213 - DNA, 20 bp, Homo sapiens
catagagtcaatgtgggatg

SEQ ID NO: 10214 - DNA, 20 bp, Homo sapiens
gtgggatggggtgttctttt

SEQ ID NO: 10215 - DNA, 20 bp, Homo sapiens
tgggatggggtgttctttta

SEQ ID NO: 10216 - DNA, 20 bp, Homo sapiens
gggatggggtgttcttttag

SEQ ID NO: 10217 - DNA, 20 bp, Homo sapiens
ggatggggtgttcttttagg

SEQ ID NO: 10218 - DNA, 20 bp, Homo sapiens
gatggggtgttcttttaggg

SEQ ID NO: 10219 - DNA, 20 bp, Homo sapiens
ggggtgttcttttagggggg

SEQ ID NO: 10220 - DNA, 20 bp, Homo sapiens
gttcttttaggggggtggtc

SEQ ID NO: 10221 - DNA, 20 bp, Homo sapiens
ttcttttaggggggtggtca

SEQ ID NO: 10222 - DNA, 20 bp, Homo sapiens
tatctccctcctcttcattg

SEQ ID NO: 10223 - DNA, 20 bp, Homo sapiens
atatctccctcctcttcatt

SEQ ID NO: 10224 - DNA, 20 bp, Homo sapiens
aagcagagaccccaatgaag

SEQ ID NO: 10225 - DNA, 20 bp, Homo sapiens
catatctccctcctcttcat

SEQ ID NO: 10226 - DNA, 20 bp, Homo sapiens
cagagaccccaatgaagagg

SEQ ID NO: 10227 - DNA, 20 bp, Homo sapiens
agagaccccaatgaagagga

SEQ ID NO: 10228 - DNA, 20 bp, Homo sapiens
gatatgcgatgcatttagtt

SEQ ID NO: 10229 - DNA, 20 bp, Homo sapiens
atatgcgatgcatttagtta

SEQ ID NO: 10230 - DNA, 20 bp, Homo sapiens
tatgcgatgcatttagttag

SEQ ID NO: 10231 - DNA, 20 bp, Homo sapiens
cacttgctatcctattttca

SEQ ID NO: 10232 - DNA, 20 bp, Homo sapiens
gaagaacattccatgaaaat

SEQ ID NO: 10233 - DNA, 20 bp, Homo sapiens
aaataggatagcaagtgcaa

SEQ ID NO: 10234 - DNA, 20 bp, Homo sapiens
caaagcatgctgctgtctca

SEQ ID NO: 10235 - DNA, 20 bp, Homo sapiens
acaaagcatgctgctgtctc

SEQ ID NO: 10236 - DNA, 20 bp, Homo sapiens
gcagcatgctttgtgtgttg

SEQ ID NO: 10237 - DNA, 20 bp, Homo sapiens
cagcatgctttgtgtgttga

SEQ ID NO: 10238 - DNA, 20 bp, Homo sapiens
tgtgtgttgagggaacagta

SEQ ID NO: 10239 - DNA, 20 bp, Homo sapiens
gaacagtaaggagaccagtg

SEQ ID NO: 10240 - DNA, 20 bp, Homo sapiens
tccattcacaccaaccacac

SEQ ID NO: 10241 - DNA, 20 bp, Homo sapiens
agtaaggagaccagtgtggt

SEQ ID NO: 10242 - DNA, 20 bp, Homo sapiens
accagtgtggttggtgtgaa

SEQ ID NO: 10243 - DNA, 20 bp, Homo sapiens
ttggtgtgaatggagtgaga

SEQ ID NO: 10244 - DNA, 20 bp, Homo sapiens
atggagtgagaaggagcagc

SEQ ID NO: 10245 - DNA, 20 bp, Homo sapiens
tggagtgagaaggagcagca

SEQ ID NO: 10246 - DNA, 20 bp, Homo sapiens
ggagtgagaaggagcagcag

SEQ ID NO: 10247 - DNA, 20 bp, Homo sapiens
agaaggagcagcaggggttg

SEQ ID NO: 10248 - DNA, 20 bp, Homo sapiens
gaaggagcagcaggggttga

SEQ ID NO: 10249 - DNA, 20 bp, Homo sapiens
agcaggggttgagggcagaa

SEQ ID NO: 10250 - DNA, 20 bp, Homo sapiens
ttgagggcagaatggtagtg

SEQ ID NO: 10251 - DNA, 20 bp, Homo sapiens
gcagaatggtagtgaggagc

SEQ ID NO: 10252 - DNA, 20 bp, Homo sapiens
tggcttcccatcttttataa

SEQ ID NO: 10253 - DNA, 20 bp, Homo sapiens
gtggcttcccatcttttata

SEQ ID NO: 10254 - DNA, 20 bp, Homo sapiens
gagcaggcccttataaaaga

SEQ ID NO: 10255 - DNA, 20 bp, Homo sapiens
agcaggcccttataaaagat

SEQ ID NO: 10256 - DNA, 20 bp, Homo sapiens
tataaaagatgggaagccac

SEQ ID NO: 10257 - DNA, 20 bp, Homo sapiens
ctttgttgaaagatctccag

SEQ ID NO: 10258 - DNA, 20 bp, Homo sapiens
cactggagatctttcaacaa

SEQ ID NO: 10259 - DNA, 20 bp, Homo sapiens
actggagatctttcaacaaa

SEQ ID NO: 10260 - DNA, 20 bp, Homo sapiens
ctggagatctttcaacaaag

SEQ ID NO: 10261 - DNA, 20 bp, Homo sapiens
aatagaacagcaaaaaatct

SEQ ID NO: 10262 - DNA, 20 bp, Homo sapiens
atagaacagcaaaaaatcta

SEQ ID NO: 10263 - DNA, 20 bp, Homo sapiens
tagaacagcaaaaaatctag

SEQ ID NO: 10264 - DNA, 20 bp, Homo sapiens
acctggcatataagtaaaac

SEQ ID NO: 10265 - DNA, 20 bp, Homo sapiens
gccagttttacttatatgcc

SEQ ID NO: 10266 - DNA, 20 bp, Homo sapiens
cctagccacatattttcacc

SEQ ID NO: 10267 - DNA, 20 bp, Homo sapiens
atatgccaggtgaaaatatg

SEQ ID NO: 10268 - DNA, 20 bp, Homo sapiens
ccaggtgaaaatatgtggct

SEQ ID NO: 10269 - DNA, 20 bp, Homo sapiens
aaatatgtggctaggtgcag

SEQ ID NO: 10270 - DNA, 20 bp, Homo sapiens
tcccaaactgctgcaattac

SEQ ID NO: 10271 - DNA, 20 bp, Homo sapiens
tacctgtaattgcagcagtt

SEQ ID NO: 10272 - DNA, 20 bp, Homo sapiens
acctgtaattgcagcagttt

SEQ ID NO: 10273 - DNA, 20 bp, Homo sapiens
agcagtttgggagaccgaag

SEQ ID NO: 10274 - DNA, 20 bp, Homo sapiens
gcagtttgggagaccgaagt

SEQ ID NO: 10275 - DNA, 20 bp, Homo sapiens
ctcagatgatctgcccactt

SEQ ID NO: 10276 - DNA, 20 bp, Homo sapiens
tgggcagatcatctgagatc

SEQ ID NO: 10277 - DNA, 20 bp, Homo sapiens
atcaggattcaagaccagca

SEQ ID NO: 10278 - DNA, 20 bp, Homo sapiens
tttcaccatgttggccatgc

SEQ ID NO: 10279 - DNA, 20 bp, Homo sapiens
caagaccagcatggccaaca

SEQ ID NO: 10280 - DNA, 20 bp, Homo sapiens
gagatggggtttcaccatgt

SEQ ID NO: 10281 - DNA, 20 bp, Homo sapiens
tttaatttttagtagagatg

SEQ ID NO: 10282 - DNA, 20 bp, Homo sapiens
ttttaatttttagtagagat

SEQ ID NO: 10283 - DNA, 20 bp, Homo sapiens
tttttaatttttagtagaga

SEQ ID NO: 10284 - DNA, 20 bp, Homo sapiens
taaaaattaaaaaataagcc

SEQ ID NO: 10285 - DNA, 20 bp, Homo sapiens
attaaaaaataagccaggcg

SEQ ID NO: 10286 - DNA, 20 bp, Homo sapiens
ctgggatccaacaccacgcc

SEQ ID NO: 10287 - DNA, 20 bp, Homo sapiens
aaataagccaggcgtggtgt

SEQ ID NO: 10288 - DNA, 20 bp, Homo sapiens
cctcagcctcccaagtagct

SEQ ID NO: 10289 - DNA, 20 bp, Homo sapiens
ggtgttggatcccagctact

SEQ ID NO: 10290 - DNA, 20 bp, Homo sapiens
gcctcagcctcccaagtagc

SEQ ID NO: 10291 - DNA, 20 bp, Homo sapiens
gtgttggatcccagctactt

SEQ ID NO: 10292 - DNA, 20 bp, Homo sapiens
ttggatcccagctacttggg

SEQ ID NO: 10293 - DNA, 20 bp, Homo sapiens
cccagctacttgggaggctg

SEQ ID NO: 10294 - DNA, 20 bp, Homo sapiens
gcagtagaattgcttgaacc

SEQ ID NO: 10295 - DNA, 20 bp, Homo sapiens
cagtagaattgcttgaaccc

SEQ ID NO: 10296 - DNA, 20 bp, Homo sapiens
tagaattgcttgaacccggg

SEQ ID NO: 10297 - DNA, 20 bp, Homo sapiens
cactgcaacctctgcctccc

SEQ ID NO: 10298 - DNA, 20 bp, Homo sapiens
tcactgcaacctctgcctcc

SEQ ID NO: 10299 - DNA, 20 bp, Homo sapiens
tgcttgaacccgggaggcag

SEQ ID NO: 10300 - DNA, 20 bp, Homo sapiens
tttttttttagacagagtct

SEQ ID NO: 10301 - DNA, 20 bp, Homo sapiens
aaaaaagaaaatacacattc

SEQ ID NO: 10302 - DNA, 20 bp, Homo sapiens
agaaaatacacattcaggcc

SEQ ID NO: 10303 - DNA, 20 bp, Homo sapiens
caggcgtgagccactgcacc

SEQ ID NO: 10304 - DNA, 20 bp, Homo sapiens
cacattcaggccaggtgcag

SEQ ID NO: 10305 - DNA, 20 bp, Homo sapiens
tcccaaagtgctgggattac

SEQ ID NO: 10306 - DNA, 20 bp, Homo sapiens
tctcagcctcccaaagtgct

SEQ ID NO: 10307 - DNA, 20 bp, Homo sapiens
cgcctgtaatcccagcactt

SEQ ID NO: 10308 - DNA, 20 bp, Homo sapiens
gtctcagcctcccaaagtgc

SEQ ID NO: 10309 - DNA, 20 bp, Homo sapiens
gcctgtaatcccagcacttt

SEQ ID NO: 10310 - DNA, 20 bp, Homo sapiens
tgtaatcccagcactttggg

SEQ ID NO: 10311 - DNA, 20 bp, Homo sapiens
gcactttgggaggctgagac

SEQ ID NO: 10312 - DNA, 20 bp, Homo sapiens
tgagacaggtagatcacttg

SEQ ID NO: 10313 - DNA, 20 bp, Homo sapiens
caggtagatcacttgaggtc

SEQ ID NO: 10314 - DNA, 20 bp, Homo sapiens
ttttgccatgttggtcaggc

SEQ ID NO: 10315 - DNA, 20 bp, Homo sapiens
agggttttgccatgttggtc

SEQ ID NO: 10316 - DNA, 20 bp, Homo sapiens
cgagaccagcctgaccaaca

SEQ ID NO: 10317 - DNA, 20 bp, Homo sapiens
gagacagggttttgccatgt

SEQ ID NO: 10318 - DNA, 20 bp, Homo sapiens
ttgtatttctggtagagaca

SEQ ID NO: 10319 - DNA, 20 bp, Homo sapiens
tttgtatttctggtagagac

SEQ ID NO: 10320 - DNA, 20 bp, Homo sapiens
ctggctaatttttgtatttc

SEQ ID NO: 10321 - DNA, 20 bp, Homo sapiens
cagaaatacaaaaattagcc

SEQ ID NO: 10322 - DNA, 20 bp, Homo sapiens
atacaaaaattagccaggcg

SEQ ID NO: 10323 - DNA, 20 bp, Homo sapiens
caggcacacgccaccacgcc

SEQ ID NO: 10324 - DNA, 20 bp, Homo sapiens
caaaaattagccaggcgtgg

SEQ ID NO: 10325 - DNA, 20 bp, Homo sapiens
tccccagtagctgggactac

SEQ ID NO: 10326 - DNA, 20 bp, Homo sapiens
gtgcctgtagtcccagctac

SEQ ID NO: 10327 - DNA, 20 bp, Homo sapiens
cttcagcctccccagtagct

SEQ ID NO: 10328 - DNA, 20 bp, Homo sapiens
tgcctgtagtcccagctact

SEQ ID NO: 10329 - DNA, 20 bp, Homo sapiens
acttcagcctccccagtagc

SEQ ID NO: 10330 - DNA, 20 bp, Homo sapiens
gcctgtagtcccagctactg

SEQ ID NO: 10331 - DNA, 20 bp, Homo sapiens
tgtagtcccagctactgggg

SEQ ID NO: 10332 - DNA, 20 bp, Homo sapiens
gctactggggaggctgaagt

SEQ ID NO: 10333 - DNA, 20 bp, Homo sapiens
ctactggggaggctgaagta

SEQ ID NO: 10334 - DNA, 20 bp, Homo sapiens
tactggggaggctgaagtag

SEQ ID NO: 10335 - DNA, 20 bp, Homo sapiens
gggaggctgaagtaggggaa

SEQ ID NO: 10336 - DNA, 20 bp, Homo sapiens
taggggaatggcttgacccc

SEQ ID NO: 10337 - DNA, 20 bp, Homo sapiens
gggaatggcttgaccccagg

SEQ ID NO: 10338 - DNA, 20 bp, Homo sapiens
actataacctccacctcctg

SEQ ID NO: 10339 - DNA, 20 bp, Homo sapiens
aatggcttgaccccaggagg

SEQ ID NO: 10340 - DNA, 20 bp, Homo sapiens
cactataacctccacctcct

SEQ ID NO: 10341 - DNA, 20 bp, Homo sapiens
tcactataacctccacctcc

SEQ ID NO: 10342 - DNA, 20 bp, Homo sapiens
ggcttgaccccaggaggtgg

SEQ ID NO: 10343 - DNA, 20 bp, Homo sapiens
gtggaggttatagtgagtcg

SEQ ID NO: 10344 - DNA, 20 bp, Homo sapiens
tcacctaggctggagggcag

SEQ ID NO: 10345 - DNA, 20 bp, Homo sapiens
actctgtcacctaggctgga

SEQ ID NO: 10346 - DNA, 20 bp, Homo sapiens
cactctgtcacctaggctgg

SEQ ID NO: 10347 - DNA, 20 bp, Homo sapiens
gcaccactgccctccagcct

SEQ ID NO: 10348 - DNA, 20 bp, Homo sapiens
tctcactctgtcacctaggc

SEQ ID NO: 10349 - DNA, 20 bp, Homo sapiens
acagtctcactctgtcacct

SEQ ID NO: 10350 - DNA, 20 bp, Homo sapiens
taaaggtgaacagttctgga

SEQ ID NO: 10351 - DNA, 20 bp, Homo sapiens
agaataaaggtgaacagttc

SEQ ID NO: 10352 - DNA, 20 bp, Homo sapiens
gatgtttgcttgtagaataa

SEQ ID NO: 10353 - DNA, 20 bp, Homo sapiens
tacaagcaaacatcttttat

SEQ ID NO: 10354 - DNA, 20 bp, Homo sapiens
ctgcttagggacacatatat

SEQ ID NO: 10355 - DNA, 20 bp, Homo sapiens
cctgcttagggacacatata

SEQ ID NO: 10356 - DNA, 20 bp, Homo sapiens
ccatatatgtgtccctaagc

SEQ ID NO: 10357 - DNA, 20 bp, Homo sapiens
tggcattcacctcctgctta

SEQ ID NO: 10358 - DNA, 20 bp, Homo sapiens
ttggcattcacctcctgctt

SEQ ID NO: 10359 - DNA, 20 bp, Homo sapiens
tatatgtgtccctaagcagg

SEQ ID NO: 10360 - DNA, 20 bp, Homo sapiens
tacgccatttgtctcttatt

SEQ ID NO: 10361 - DNA, 20 bp, Homo sapiens
aatgccaaataagagacaaa

SEQ ID NO: 10362 - DNA, 20 bp, Homo sapiens
cactatgagttgtgtgacgt

SEQ ID NO: 10363 - DNA, 20 bp, Homo sapiens
actatgagttgtgtgacgtt

SEQ ID NO: 10364 - DNA, 20 bp, Homo sapiens
gaagctaaccaaggctcaga

SEQ ID NO: 10365 - DNA, 20 bp, Homo sapiens
agaagctaaccaaggctcag

SEQ ID NO: 10366 - DNA, 20 bp, Homo sapiens
actttactccctctgagcct

SEQ ID NO: 10367 - DNA, 20 bp, Homo sapiens
ttttacagagaagctaacca

SEQ ID NO: 10368 - DNA, 20 bp, Homo sapiens
tagcttctctgtaaaatgaa

SEQ ID NO: 10369 - DNA, 20 bp, Homo sapiens
tctgtaaaatgaaaggatta

SEQ ID NO: 10370 - DNA, 20 bp, Homo sapiens
aaggattatggtaactaagc

SEQ ID NO: 10371 - DNA, 20 bp, Homo sapiens
tacagtttgttaaagctgga

SEQ ID NO: 10372 - DNA, 20 bp, Homo sapiens
tccatacagtttgttaaagc

SEQ ID NO: 10373 - DNA, 20 bp, Homo sapiens
tccagctttaacaaactgta

SEQ ID NO: 10374 - DNA, 20 bp, Homo sapiens
agctttaacaaactgtatgg

SEQ ID NO: 10375 - DNA, 20 bp, Homo sapiens
aactgtatggaggtactttt

SEQ ID NO: 10376 - DNA, 20 bp, Homo sapiens
aggtactttttggagttacc

SEQ ID NO: 10377 - DNA, 20 bp, Homo sapiens
ggtactttttggagttacct

SEQ ID NO: 10378 - DNA, 20 bp, Homo sapiens
ctcacactcaaaaattaccc

SEQ ID NO: 10379 - DNA, 20 bp, Homo sapiens
gtaatttttgagtgtgagat

SEQ ID NO: 10380 - DNA, 20 bp, Homo sapiens
ttgctttaatataccatgtc

SEQ ID NO: 10381 - DNA, 20 bp, Homo sapiens
caaaaagctaaggccagaca

SEQ ID NO: 10382 - DNA, 20 bp, Homo sapiens
aaagactctgcaaaaagcta

SEQ ID NO: 10383 - DNA, 20 bp, Homo sapiens
gagtctttgtgaagaagcag

SEQ ID NO: 10384 - DNA, 20 bp, Homo sapiens
tctttgtgaagaagcagagg

SEQ ID NO: 10385 - DNA, 20 bp, Homo sapiens
acgaactgaacgttaactta

SEQ ID NO: 10386 - DNA, 20 bp, Homo sapiens
gtaagttaacgttcagttcg

SEQ ID NO: 10387 - DNA, 20 bp, Homo sapiens
aacgttcagttcgtggcagc

SEQ ID NO: 10388 - DNA, 20 bp, Homo sapiens
ggcagctggcaatccaaccc

SEQ ID NO: 10389 - DNA, 20 bp, Homo sapiens
gcagctggcaatccaaccct

SEQ ID NO: 10390 - DNA, 20 bp, Homo sapiens
ccggcagcctttcccagggt

SEQ ID NO: 10391 - DNA, 20 bp, Homo sapiens
tggcaatccaaccctgggaa

SEQ ID NO: 10392 - DNA, 20 bp, Homo sapiens
aaatccggcagcctttccca

SEQ ID NO: 10393 - DNA, 20 bp, Homo sapiens
taaatccggcagcctttccc

SEQ ID NO: 10394 - DNA, 20 bp, Homo sapiens
ccaaccctgggaaaggctgc

SEQ ID NO: 10395 - DNA, 20 bp, Homo sapiens
ccttgcatttttgctaaatc

SEQ ID NO: 10396 - DNA, 20 bp, Homo sapiens
ccggatttagcaaaaatgca

SEQ ID NO: 10397 - DNA, 20 bp, Homo sapiens
tttttaaatttgaaatgaat

SEQ ID NO: 10398 - DNA, 20 bp, Homo sapiens
ttttaaatttgaaatgaatt

SEQ ID NO: 10399 - DNA, 20 bp, Homo sapiens
agggttgccaaataaaatgc

SEQ ID NO: 10400 - DNA, 20 bp, Homo sapiens
tgggtatcctgcattttatt

SEQ ID NO: 10401 - DNA, 20 bp, Homo sapiens
tttatttggcaaccctgtcc

SEQ ID NO: 10402 - DNA, 20 bp, Homo sapiens
ttatttggcaaccctgtcct

SEQ ID NO: 10403 - DNA, 20 bp, Homo sapiens
atagtgtgagtcccaggaca

SEQ ID NO: 10404 - DNA, 20 bp, Homo sapiens
aatagtgtgagtcccaggac

SEQ ID NO: 10405 - DNA, 20 bp, Homo sapiens
cagtgaatagtgtgagtccc

SEQ ID NO: 10406 - DNA, 20 bp, Homo sapiens
acactattcactgttatcac

SEQ ID NO: 10407 - DNA, 20 bp, Homo sapiens
tatcactggtatgttcaaag

SEQ ID NO: 10408 - DNA, 20 bp, Homo sapiens
ctggtactttgcaagacaga

SEQ ID NO: 10409 - DNA, 20 bp, Homo sapiens
cctggtactttgcaagacag

SEQ ID NO: 10410 - DNA, 20 bp, Homo sapiens
cctctgtcttgcaaagtacc

SEQ ID NO: 10411 - DNA, 20 bp, Homo sapiens
ctgtcttgcaaagtaccagg

SEQ ID NO: 10412 - DNA, 20 bp, Homo sapiens
aagaataagaaaagacctcc

SEQ ID NO: 10413 - DNA, 20 bp, Homo sapiens
ggtcttttcttattcttcac

SEQ ID NO: 10414 - DNA, 20 bp, Homo sapiens
ggagtcaaaaaagagaatag

SEQ ID NO: 10415 - DNA, 20 bp, Homo sapiens
ttgttggtcttaactcttaa

SEQ ID NO: 10416 - DNA, 20 bp, Homo sapiens
atgtaaagaagaaaacttgt

SEQ ID NO: 10417 - DNA, 20 bp, Homo sapiens
tgtttttgacatgagcaaac

SEQ ID NO: 10418 - DNA, 20 bp, Homo sapiens
actggtgattaaaaacaact

SEQ ID NO: 10419 - DNA, 20 bp, Homo sapiens
ctggtgattaaaaacaactt

SEQ ID NO: 10420 - DNA, 20 bp, Homo sapiens
gtgattaaaaacaacttggg

SEQ ID NO: 10421 - DNA, 20 bp, Homo sapiens
cctcagcttcccaaggtgct

SEQ ID NO: 10422 - DNA, 20 bp, Homo sapiens
tacttgtaatcccagcacct

SEQ ID NO: 10423 - DNA, 20 bp, Homo sapiens
acctcagcttcccaaggtgc

SEQ ID NO: 10424 - DNA, 20 bp, Homo sapiens
acttgtaatcccagcacctt

SEQ ID NO: 10425 - DNA, 20 bp, Homo sapiens
tctcccacctcagcttccca

SEQ ID NO: 10426 - DNA, 20 bp, Homo sapiens
cccagcaccttgggaagctg

SEQ ID NO: 10427 - DNA, 20 bp, Homo sapiens
agcaccttgggaagctgagg

SEQ ID NO: 10428 - DNA, 20 bp, Homo sapiens
gcaccttgggaagctgaggt

SEQ ID NO: 10429 - DNA, 20 bp, Homo sapiens
tgaggtgggagaatagcttg

SEQ ID NO: 10430 - DNA, 20 bp, Homo sapiens
tgggagaatagcttgaggcc

SEQ ID NO: 10431 - DNA, 20 bp, Homo sapiens
gttgccctggcttgaactcc

SEQ ID NO: 10432 - DNA, 20 bp, Homo sapiens
tgaggccaggagttcaagcc

SEQ ID NO: 10433 - DNA, 20 bp, Homo sapiens
gaggccaggagttcaagcca

SEQ ID NO: 10434 - DNA, 20 bp, Homo sapiens
ggggtctcactatgttgccc

SEQ ID NO: 10435 - DNA, 20 bp, Homo sapiens
ttgtatcttttgtagagatg

SEQ ID NO: 10436 - DNA, 20 bp, Homo sapiens
tttgtatcttttgtagagat

SEQ ID NO: 10437 - DNA, 20 bp, Homo sapiens
ttttgtatcttttgtagaga

SEQ ID NO: 10438 - DNA, 20 bp, Homo sapiens
aaaagatacaaaaattagcc

SEQ ID NO: 10439 - DNA, 20 bp, Homo sapiens
atacaaaaattagccaggcg

SEQ ID NO: 10440 - DNA, 20 bp, Homo sapiens
tacaggtgtaccaccacgcc

SEQ ID NO: 10441 - DNA, 20 bp, Homo sapiens
caaaaattagccaggcgtgg

SEQ ID NO: 10442 - DNA, 20 bp, Homo sapiens
tccagagcagctgggactac

SEQ ID NO: 10443 - DNA, 20 bp, Homo sapiens
tctcagcctccagagcagct

SEQ ID NO: 10444 - DNA, 20 bp, Homo sapiens
atctcagcctccagagcagc

SEQ ID NO: 10445 - DNA, 20 bp, Homo sapiens
acctgtagtcccagctgctc

SEQ ID NO: 10446 - DNA, 20 bp, Homo sapiens
tgtagtcccagctgctctgg

SEQ ID NO: 10447 - DNA, 20 bp, Homo sapiens
agctgctctggaggctgaga

SEQ ID NO: 10448 - DNA, 20 bp, Homo sapiens
gctgctctggaggctgagat

SEQ ID NO: 10449 - DNA, 20 bp, Homo sapiens
gctctggaggctgagatggg

SEQ ID NO: 10450 - DNA, 20 bp, Homo sapiens
atgggaggatcagttgagct

SEQ ID NO: 10451 - DNA, 20 bp, Homo sapiens
tgggaggatcagttgagctt

SEQ ID NO: 10452 - DNA, 20 bp, Homo sapiens
gaggatcagttgagcttggg

SEQ ID NO: 10453 - DNA, 20 bp, Homo sapiens
ttgtccaggctggagtgcag

SEQ ID NO: 10454 - DNA, 20 bp, Homo sapiens
catgccactgcactccagcc

SEQ ID NO: 10455 - DNA, 20 bp, Homo sapiens
tcttgctctgttgtccaggc

SEQ ID NO: 10456 - DNA, 20 bp, Homo sapiens
agggtcttgctctgttgtcc

SEQ ID NO: 10457 - DNA, 20 bp, Homo sapiens
ttgtttccttttttgagaca

SEQ ID NO: 10458 - DNA, 20 bp, Homo sapiens
tttgtttccttttttgagac

SEQ ID NO: 10459 - DNA, 20 bp, Homo sapiens
gcaagaccctgtctcaaaaa

SEQ ID NO: 10460 - DNA, 20 bp, Homo sapiens
aaaaaggaaacaaaacaact

SEQ ID NO: 10461 - DNA, 20 bp, Homo sapiens
aaacaaaacaacttggacaa

SEQ ID NO: 10462 - DNA, 20 bp, Homo sapiens
aaaacaacttggacaatgga

SEQ ID NO: 10463 - DNA, 20 bp, Homo sapiens
aaacaacttggacaatggaa

SEQ ID NO: 10464 - DNA, 20 bp, Homo sapiens
aacaacttggacaatggaag

SEQ ID NO: 10465 - DNA, 20 bp, Homo sapiens
acaacttggacaatggaagg

SEQ ID NO: 10466 - DNA, 20 bp, Homo sapiens
ggtgcaattttggctgcttg

SEQ ID NO: 10467 - DNA, 20 bp, Homo sapiens
gagtccatttggtgcaattt

SEQ ID NO: 10468 - DNA, 20 bp, Homo sapiens
gcagccaaaattgcaccaaa

SEQ ID NO: 10469 - DNA, 20 bp, Homo sapiens
ttgtcttctgggagtccatt

SEQ ID NO: 10470 - DNA, 20 bp, Homo sapiens
aaattaaatgcttgtcttct

SEQ ID NO: 10471 - DNA, 20 bp, Homo sapiens
caaattaaatgcttgtcttc

SEQ ID NO: 10472 - DNA, 20 bp, Homo sapiens
tttgttaattgagccctcta

SEQ ID NO: 10473 - DNA, 20 bp, Homo sapiens
ttgttaattgagccctctat

SEQ ID NO: 10474 - DNA, 20 bp, Homo sapiens
aatacagacaggcccataga

SEQ ID NO: 10475 - DNA, 20 bp, Homo sapiens
aaatacagacaggcccatag

SEQ ID NO: 10476 - DNA, 20 bp, Homo sapiens
tttcttaaataaatacagac

SEQ ID NO: 10477 - DNA, 20 bp, Homo sapiens
acccaataactatgcttgat

SEQ ID NO: 10478 - DNA, 20 bp, Homo sapiens
atcctatcaagcatagttat

SEQ ID NO: 10479 - DNA, 20 bp, Homo sapiens
tcctatcaagcatagttatt

SEQ ID NO: 10480 - DNA, 20 bp, Homo sapiens
gttattgggtttctcagccc

SEQ ID NO: 10481 - DNA, 20 bp, Homo sapiens
ctgctatttctaatctacct

SEQ ID NO: 10482 - DNA, 20 bp, Homo sapiens
tctgctatttctaatctacc

SEQ ID NO: 10483 - DNA, 20 bp, Homo sapiens
gattagaaatagcagattag

SEQ ID NO: 10484 - DNA, 20 bp, Homo sapiens
tagaaatagcagattagagg

SEQ ID NO: 10485 - DNA, 20 bp, Homo sapiens
agaaatagcagattagaggt

SEQ ID NO: 10486 - DNA, 20 bp, Homo sapiens
tagcagattagaggtgggct

SEQ ID NO: 10487 - DNA, 20 bp, Homo sapiens
gaggtgggctaggtttctag

SEQ ID NO: 10488 - DNA, 20 bp, Homo sapiens
ctttcacttctaacttctgc

SEQ ID NO: 10489 - DNA, 20 bp, Homo sapiens
gaaagcaaagagcctaacag

SEQ ID NO: 10490 - DNA, 20 bp, Homo sapiens
agaatttctcttcctctgtt

SEQ ID NO: 10491 - DNA, 20 bp, Homo sapiens
cagttttgctcttgttgccc

SEQ ID NO: 10492 - DNA, 20 bp, Homo sapiens
tttgctcttgttgcccaggc

SEQ ID NO: 10493 - DNA, 20 bp, Homo sapiens
gcgccattgcactccagcct

SEQ ID NO: 10494 - DNA, 20 bp, Homo sapiens
agcgccattgcactccagcc

SEQ ID NO: 10495 - DNA, 20 bp, Homo sapiens
ttgcccaggctggagtgcaa

SEQ ID NO: 10496 - DNA, 20 bp, Homo sapiens
ggagtgcaatggcgctatct

SEQ ID NO: 10497 - DNA, 20 bp, Homo sapiens
cacttgaacccaggaggctg

SEQ ID NO: 10498 - DNA, 20 bp, Homo sapiens
tcactacaacctcagcctcc

SEQ ID NO: 10499 - DNA, 20 bp, Homo sapiens
cactacaacctcagcctcct

SEQ ID NO: 10500 - DNA, 20 bp, Homo sapiens
gagaatcacttgaacccagg

SEQ ID NO: 10501 - DNA, 20 bp, Homo sapiens
caggagaatcacttgaaccc

SEQ ID NO: 10502 - DNA, 20 bp, Homo sapiens
gctactcgggaggctgaggc

SEQ ID NO: 10503 - DNA, 20 bp, Homo sapiens
cccagctactcgggaggctg

SEQ ID NO: 10504 - DNA, 20 bp, Homo sapiens
tgtaatcccagctactcggg

SEQ ID NO: 10505 - DNA, 20 bp, Homo sapiens
gcctgtaatcccagctactc

SEQ ID NO: 10506 - DNA, 20 bp, Homo sapiens
gcctcagcctcccgagtagc

SEQ ID NO: 10507 - DNA, 20 bp, Homo sapiens
tgcctgtaatcccagctact

SEQ ID NO: 10508 - DNA, 20 bp, Homo sapiens
cctcagcctcccgagtagct

SEQ ID NO: 10509 - DNA, 20 bp, Homo sapiens
tcccgagtagctgggattac

SEQ ID NO: 10510 - DNA, 20 bp, Homo sapiens
acaaaattagccgggtgtgg

SEQ ID NO: 10511 - DNA, 20 bp, Homo sapiens
caggcatgcaccaccacacc

SEQ ID NO: 10512 - DNA, 20 bp, Homo sapiens
aatacaaaattagccgggtg

SEQ ID NO: 10513 - DNA, 20 bp, Homo sapiens
ctaaaaatacaaaattagcc

SEQ ID NO: 10514 - DNA, 20 bp, Homo sapiens
actaaaaatacaaaattagc

SEQ ID NO: 10515 - DNA, 20 bp, Homo sapiens
tttgtatttttagtagagac

SEQ ID NO: 10516 - DNA, 20 bp, Homo sapiens
ttgtatttttagtagagaca

SEQ ID NO: 10517 - DNA, 20 bp, Homo sapiens
gagacagggtttctccatgt

SEQ ID NO: 10518 - DNA, 20 bp, Homo sapiens
cgagaccagcatgaccaaca

SEQ ID NO: 10519 - DNA, 20 bp, Homo sapiens
tttctccatgttggtcatgc

SEQ ID NO: 10520 - DNA, 20 bp, Homo sapiens
ggtctcgaactcctgacctc

SEQ ID NO: 10521 - DNA, 20 bp, Homo sapiens
tgggcggatcacctgaggtc

SEQ ID NO: 10522 - DNA, 20 bp, Homo sapiens
caaggtgggcggatcacctg

SEQ ID NO: 10523 - DNA, 20 bp, Homo sapiens
ctttgggaggccaaggtggg

SEQ ID NO: 10524 - DNA, 20 bp, Homo sapiens
ctcaggtgatccgcccacct

SEQ ID NO: 10525 - DNA, 20 bp, Homo sapiens
gcactttgggaggccaaggt

SEQ ID NO: 10526 - DNA, 20 bp, Homo sapiens
agcactttgggaggccaagg

SEQ ID NO: 10527 - DNA, 20 bp, Homo sapiens
cccagcactttgggaggcca

SEQ ID NO: 10528 - DNA, 20 bp, Homo sapiens
tgtaatcccagcactttggg

SEQ ID NO: 10529 - DNA, 20 bp, Homo sapiens
ccctgtaatcccagcacttt

SEQ ID NO: 10530 - DNA, 20 bp, Homo sapiens
accttggcctcccaaagtgc

SEQ ID NO: 10531 - DNA, 20 bp, Homo sapiens
tccctgtaatcccagcactt

SEQ ID NO: 10532 - DNA, 20 bp, Homo sapiens
ccttggcctcccaaagtgct

SEQ ID NO: 10533 - DNA, 20 bp, Homo sapiens
tcccaaagtgctgggattac

SEQ ID NO: 10534 - DNA, 20 bp, Homo sapiens
cccaaagtgctgggattaca

SEQ ID NO: 10535 - DNA, 20 bp, Homo sapiens
aatttgtcggccggtcgcag

SEQ ID NO: 10536 - DNA, 20 bp, Homo sapiens
cagggataagccactgcgac

SEQ ID NO: 10537 - DNA, 20 bp, Homo sapiens
agttttaagaatttgtcggc

SEQ ID NO: 10538 - DNA, 20 bp, Homo sapiens
gtccagttttaagaatttgt

SEQ ID NO: 10539 - DNA, 20 bp, Homo sapiens
ggccgacaaattcttaaaac

SEQ ID NO: 10540 - DNA, 20 bp, Homo sapiens
acacaagaacacaaaacgct

SEQ ID NO: 10541 - DNA, 20 bp, Homo sapiens
cacaagaacacaaaacgctt

SEQ ID NO: 10542 - DNA, 20 bp, Homo sapiens
aaaaggtgtgtagctgtgga

SEQ ID NO: 10543 - DNA, 20 bp, Homo sapiens
gaaaaggtgtgtagctgtgg

SEQ ID NO: 10544 - DNA, 20 bp, Homo sapiens
gtggaaaaggtgtgtagctg

SEQ ID NO: 10545 - DNA, 20 bp, Homo sapiens
cgtgccatataacgtggaaa

SEQ ID NO: 10546 - DNA, 20 bp, Homo sapiens
ttataacgtgccatataacg

SEQ ID NO: 10547 - DNA, 20 bp, Homo sapiens
cacaccttttccacgttata

SEQ ID NO: 10548 - DNA, 20 bp, Homo sapiens
gttatatggcacgttataag

SEQ ID NO: 10549 - DNA, 20 bp, Homo sapiens
ttatatggcacgttataagt

SEQ ID NO: 10550 - DNA, 20 bp, Homo sapiens
taagtgggtgttcctagtga

SEQ ID NO: 10551 - DNA, 20 bp, Homo sapiens
aaaaaatcagaaccatcact

SEQ ID NO: 10552 - DNA, 20 bp, Homo sapiens
ctgaggcttactcatcactg

SEQ ID NO: 10553 - DNA, 20 bp, Homo sapiens
atgaattttccagatagctg

SEQ ID NO: 10554 - DNA, 20 bp, Homo sapiens
atgagtaagcctcagctatc

SEQ ID NO: 10555 - DNA, 20 bp, Homo sapiens
gctatctggaaaattcatgc

SEQ ID NO: 10556 - DNA, 20 bp, Homo sapiens
aattactcagtaacgatctc

SEQ ID NO: 10557 - DNA, 20 bp, Homo sapiens
tcaagctaactgcgtcatgc

SEQ ID NO: 10558 - DNA, 20 bp, Homo sapiens
ttagctgatattggcatgca

SEQ ID NO: 10559 - DNA, 20 bp, Homo sapiens
tttagctgatattggcatgc

SEQ ID NO: 10560 - DNA, 20 bp, Homo sapiens
gtgctgcttttagctgatat

SEQ ID NO: 10561 - DNA, 20 bp, Homo sapiens
gctaaaagcagcaccacgaa

SEQ ID NO: 10562 - DNA, 20 bp, Homo sapiens
ctaaaagcagcaccacgaaa

SEQ ID NO: 10563 - DNA, 20 bp, Homo sapiens
agattcgtatttccctttcg

SEQ ID NO: 10564 - DNA, 20 bp, Homo sapiens
ccagtgtcgttaacaagaat

SEQ ID NO: 10565 - DNA, 20 bp, Homo sapiens
tccagtgtcgttaacaagaa

SEQ ID NO: 10566 - DNA, 20 bp, Homo sapiens
cccattcttgttaacgacac

SEQ ID NO: 10567 - DNA, 20 bp, Homo sapiens
gatttatctgtgtattatta

SEQ ID NO: 10568 - DNA, 20 bp, Homo sapiens
aatacacagataaatctatc

SEQ ID NO: 10569 - DNA, 20 bp, Homo sapiens
gcttcctttcacaggaagca

SEQ ID NO: 10570 - DNA, 20 bp, Homo sapiens
atttccttgcttcctgtgaa

SEQ ID NO: 10571 - DNA, 20 bp, Homo sapiens
gaatgagtgcttcctttcac

SEQ ID NO: 10572 - DNA, 20 bp, Homo sapiens
gatgaatttcacaggacaca

SEQ ID NO: 10573 - DNA, 20 bp, Homo sapiens
tgaagttggatgaatttcac

SEQ ID NO: 10574 - DNA, 20 bp, Homo sapiens
tgtgaaattcatccaacttc

SEQ ID NO: 10575 - DNA, 20 bp, Homo sapiens
ttcctccagcttcctgaagt

SEQ ID NO: 10576 - DNA, 20 bp, Homo sapiens
ttcatccaacttcaggaagc

SEQ ID NO: 10577 - DNA, 20 bp, Homo sapiens
atccaacttcaggaagctgg

SEQ ID NO: 10578 - DNA, 20 bp, Homo sapiens
ggaagctggaggaatacata

SEQ ID NO: 10579 - DNA, 20 bp, Homo sapiens
tactctctgcccagatagct

SEQ ID NO: 10580 - DNA, 20 bp, Homo sapiens
atacatatggccaagctatc

SEQ ID NO: 10581 - DNA, 20 bp, Homo sapiens
tacatatggccaagctatct

SEQ ID NO: 10582 - DNA, 20 bp, Homo sapiens
tatctgggcagagagtagac

SEQ ID NO: 10583 - DNA, 20 bp, Homo sapiens
atctgggcagagagtagaca

SEQ ID NO: 10584 - DNA, 20 bp, Homo sapiens
ggcagagagtagacagggaa

SEQ ID NO: 10585 - DNA, 20 bp, Homo sapiens
agagagtagacagggaatgg

SEQ ID NO: 10586 - DNA, 20 bp, Homo sapiens
agtagacagggaatggaggt

SEQ ID NO: 10587 - DNA, 20 bp, Homo sapiens
gtagacagggaatggaggtt

SEQ ID NO: 10588 - DNA, 20 bp, Homo sapiens
ggaatggaggttgggcacag

SEQ ID NO: 10589 - DNA, 20 bp, Homo sapiens
ttctaaatggctgcgattac

SEQ ID NO: 10590 - DNA, 20 bp, Homo sapiens
tgtaatcgcagccatttaga

SEQ ID NO: 10591 - DNA, 20 bp, Homo sapiens
gcccgcctttgccttctaaa

SEQ ID NO: 10592 - DNA, 20 bp, Homo sapiens
cgcagccatttagaaggcaa

SEQ ID NO: 10593 - DNA, 20 bp, Homo sapiens
agccatttagaaggcaaagg

SEQ ID NO: 10594 - DNA, 20 bp, Homo sapiens
gccatttagaaggcaaaggc

SEQ ID NO: 10595 - DNA, 20 bp, Homo sapiens
cgggcagatcacttgagctc

SEQ ID NO: 10596 - DNA, 20 bp, Homo sapiens
tcaggtgttcaagaccagcc

SEQ ID NO: 10597 - DNA, 20 bp, Homo sapiens
caggtgttcaagaccagcct

SEQ ID NO: 10598 - DNA, 20 bp, Homo sapiens
cttagccatgttgcccaggc

SEQ ID NO: 10599 - DNA, 20 bp, Homo sapiens
aggacttagccatgttgccc

SEQ ID NO: 10600 - DNA, 20 bp, Homo sapiens
caagaccagcctgggcaaca

SEQ ID NO: 10601 - DNA, 20 bp, Homo sapiens
ttggtattttttgcagagac

SEQ ID NO: 10602 - DNA, 20 bp, Homo sapiens
accatatccagctcagtttt

SEQ ID NO: 10603 - DNA, 20 bp, Homo sapiens
aaaaataccaaaaactgagc

SEQ ID NO: 10604 - DNA, 20 bp, Homo sapiens
accaaaaactgagctggata

SEQ ID NO: 10605 - DNA, 20 bp, Homo sapiens
gatatggtagcacacacctg

SEQ ID NO: 10606 - DNA, 20 bp, Homo sapiens
tcccaagtagctgggaccac

SEQ ID NO: 10607 - DNA, 20 bp, Homo sapiens
cctcagcctcccaagtagct

SEQ ID NO: 10608 - DNA, 20 bp, Homo sapiens
cacctgtggtcccagctact

SEQ ID NO: 10609 - DNA, 20 bp, Homo sapiens
acctcagcctcccaagtagc

SEQ ID NO: 10610 - DNA, 20 bp, Homo sapiens
acctgtggtcccagctactt

SEQ ID NO: 10611 - DNA, 20 bp, Homo sapiens
tgtggtcccagctacttggg

SEQ ID NO: 10612 - DNA, 20 bp, Homo sapiens
cccagctacttgggaggctg

SEQ ID NO: 10613 - DNA, 20 bp, Homo sapiens
agctacttgggaggctgagg

SEQ ID NO: 10614 - DNA, 20 bp, Homo sapiens
gctacttgggaggctgaggt

SEQ ID NO: 10615 - DNA, 20 bp, Homo sapiens
acttgggaggctgaggtggg

SEQ ID NO: 10616 - DNA, 20 bp, Homo sapiens
cttgggaggctgaggtggga

SEQ ID NO: 10617 - DNA, 20 bp, Homo sapiens
gtgggagggttgcttgaccc

SEQ ID NO: 10618 - DNA, 20 bp, Homo sapiens
tgggagggttgcttgacccc

SEQ ID NO: 10619 - DNA, 20 bp, Homo sapiens
attgcagcctcaaactcccg

SEQ ID NO: 10620 - DNA, 20 bp, Homo sapiens
cattgcagcctcaaactccc

SEQ ID NO: 10621 - DNA, 20 bp, Homo sapiens
tcattgcagcctcaaactcc

SEQ ID NO: 10622 - DNA, 20 bp, Homo sapiens
tgcttgaccccgggagtttg

SEQ ID NO: 10623 - DNA, 20 bp, Homo sapiens
ttatccaggctggagtgcag

SEQ ID NO: 10624 - DNA, 20 bp, Homo sapiens
tgtgccactgcactccagcc

SEQ ID NO: 10625 - DNA, 20 bp, Homo sapiens
tctcattctgttatccaggc

SEQ ID NO: 10626 - DNA, 20 bp, Homo sapiens
agagtctcattctgttatcc

SEQ ID NO: 10627 - DNA, 20 bp, Homo sapiens
tgattttattttttattttt

SEQ ID NO: 10628 - DNA, 20 bp, Homo sapiens
ttgattttattttttatttt

SEQ ID NO: 10629 - DNA, 20 bp, Homo sapiens
atcaaagacacttaaaaaga

SEQ ID NO: 10630 - DNA, 20 bp, Homo sapiens
tcaaagacacttaaaaagat

SEQ ID NO: 10631 - DNA, 20 bp, Homo sapiens
caaagacacttaaaaagatg

SEQ ID NO: 10632 - DNA, 20 bp, Homo sapiens
cacttaaaaagatggggaaa

SEQ ID NO: 10633 - DNA, 20 bp, Homo sapiens
taaaaagatggggaaaagga

SEQ ID NO: 10634 - DNA, 20 bp, Homo sapiens
agatggggaaaaggaaggac

SEQ ID NO: 10635 - DNA, 20 bp, Homo sapiens
aagattccacttgtgtagtt

SEQ ID NO: 10636 - DNA, 20 bp, Homo sapiens
tactttcctaactacacaag

SEQ ID NO: 10637 - DNA, 20 bp, Homo sapiens
acaagtggaatcttaagctg

SEQ ID NO: 10638 - DNA, 20 bp, Homo sapiens
aatcttaagctgaggttccc

SEQ ID NO: 10639 - DNA, 20 bp, Homo sapiens
tctggctccagtcaactcct

SEQ ID NO: 10640 - DNA, 20 bp, Homo sapiens
ctctggctccagtcaactcc

SEQ ID NO: 10641 - DNA, 20 bp, Homo sapiens
tgaggttcccaggagttgac

SEQ ID NO: 10642 - DNA, 20 bp, Homo sapiens
tcctataggtctgtcttctc

SEQ ID NO: 10643 - DNA, 20 bp, Homo sapiens
gccagagaagacagacctat

SEQ ID NO: 10644 - DNA, 20 bp, Homo sapiens
ctccaattgggtgctcctat

SEQ ID NO: 10645 - DNA, 20 bp, Homo sapiens
gacctataggagcacccaat

SEQ ID NO: 10646 - DNA, 20 bp, Homo sapiens
tatggagggtgactccaatt

SEQ ID NO: 10647 - DNA, 20 bp, Homo sapiens
ctatggagggtgactccaat

SEQ ID NO: 10648 - DNA, 20 bp, Homo sapiens
gacatatgggctactatgga

SEQ ID NO: 10649 - DNA, 20 bp, Homo sapiens
agacatatgggctactatgg

SEQ ID NO: 10650 - DNA, 20 bp, Homo sapiens
gtaagacatatgggctacta

SEQ ID NO: 10651 - DNA, 20 bp, Homo sapiens
ctgatccatgtaagacatat

SEQ ID NO: 10652 - DNA, 20 bp, Homo sapiens
gctgatccatgtaagacata

SEQ ID NO: 10653 - DNA, 20 bp, Homo sapiens
agtagcccatatgtcttaca

SEQ ID NO: 10654 - DNA, 20 bp, Homo sapiens
cttacatggatcagctttcg

SEQ ID NO: 10655 - DNA, 20 bp, Homo sapiens
ttacatggatcagctttcgt

SEQ ID NO: 10656 - DNA, 20 bp, Homo sapiens
tacatggatcagctttcgtg

SEQ ID NO: 10657 - DNA, 20 bp, Homo sapiens
cttccccagatggagtaaaa

SEQ ID NO: 10658 - DNA, 20 bp, Homo sapiens
ccttccccagatggagtaaa

SEQ ID NO: 10659 - DNA, 20 bp, Homo sapiens
tggggcccttttactccatc

SEQ ID NO: 10660 - DNA, 20 bp, Homo sapiens
ggggcccttttactccatct

SEQ ID NO: 10661 - DNA, 20 bp, Homo sapiens
gggcccttttactccatctg

SEQ ID NO: 10662 - DNA, 20 bp, Homo sapiens
atctgacgcccttccccaga

SEQ ID NO: 10663 - DNA, 20 bp, Homo sapiens
ccttttactccatctgggga

SEQ ID NO: 10664 - DNA, 20 bp, Homo sapiens
cttttactccatctggggaa

SEQ ID NO: 10665 - DNA, 20 bp, Homo sapiens
ggggaagggcgtcagatctg

SEQ ID NO: 10666 - DNA, 20 bp, Homo sapiens
ttgaaaaaaagaactgggaa

SEQ ID NO: 10667 - DNA, 20 bp, Homo sapiens
tttttttgaaaaaaagaact

SEQ ID NO: 10668 - DNA, 20 bp, Homo sapiens
ttttttttgaaaaaaagaac

SEQ ID NO: 10669 - DNA, 20 bp, Homo sapiens
aaaaaaaatgtctacagaat

SEQ ID NO: 10670 - DNA, 20 bp, Homo sapiens
aaatgtctacagaatcggcc

SEQ ID NO: 10671 - DNA, 20 bp, Homo sapiens
tctacagaatcggccaggtg

SEQ ID NO: 10672 - DNA, 20 bp, Homo sapiens
caggcatgagccaccacacc

SEQ ID NO: 10673 - DNA, 20 bp, Homo sapiens
acagaatcggccaggtgtgg

SEQ ID NO: 10674 - DNA, 20 bp, Homo sapiens
ttccaaagtgctagtattac

SEQ ID NO: 10675 - DNA, 20 bp, Homo sapiens
tgcctgtaatactagcactt

SEQ ID NO: 10676 - DNA, 20 bp, Homo sapiens
tgtaatactagcactttgga

SEQ ID NO: 10677 - DNA, 20 bp, Homo sapiens
actagcactttggaaggctg

SEQ ID NO: 10678 - DNA, 20 bp, Homo sapiens
agcactttggaaggctgagg

SEQ ID NO: 10679 - DNA, 20 bp, Homo sapiens
gcactttggaaggctgaggt

SEQ ID NO: 10680 - DNA, 20 bp, Homo sapiens
ctttggaaggctgaggtggg

SEQ ID NO: 10681 - DNA, 20 bp, Homo sapiens
tgaggtgggtggatcacctg

SEQ ID NO: 10682 - DNA, 20 bp, Homo sapiens
gtgggtggatcacctgaggt

SEQ ID NO: 10683 - DNA, 20 bp, Homo sapiens
tgggtggatcacctgaggtc

SEQ ID NO: 10684 - DNA, 20 bp, Homo sapiens
ggtctcgaactcccgacctc

SEQ ID NO: 10685 - DNA, 20 bp, Homo sapiens
tcgggagttcgagaccagcc

SEQ ID NO: 10686 - DNA, 20 bp, Homo sapiens
tttcaccatgttggccaggc

SEQ ID NO: 10687 - DNA, 20 bp, Homo sapiens
ggagtttcaccatgttggcc

SEQ ID NO: 10688 - DNA, 20 bp, Homo sapiens
cgagaccagcctggccaaca

SEQ ID NO: 10689 - DNA, 20 bp, Homo sapiens
gagatggagtttcaccatgt

SEQ ID NO: 10690 - DNA, 20 bp, Homo sapiens
ttttttttttttagtagaga

SEQ ID NO: 10691 - DNA, 20 bp, Homo sapiens
aaaaaaaaaaaaaaattagc

SEQ ID NO: 10692 - DNA, 20 bp, Homo sapiens
aaaaaaaaattagctggatg

SEQ ID NO: 10693 - DNA, 20 bp, Homo sapiens
aaaaaattagctggatgtgg

SEQ ID NO: 10694 - DNA, 20 bp, Homo sapiens
aattagctggatgtggtggc

SEQ ID NO: 10695 - DNA, 20 bp, Homo sapiens
tcccaagtagctgagattat

SEQ ID NO: 10696 - DNA, 20 bp, Homo sapiens
cgcctataatctcagctact

SEQ ID NO: 10697 - DNA, 20 bp, Homo sapiens
gcctataatctcagctactt

SEQ ID NO: 10698 - DNA, 20 bp, Homo sapiens
tataatctcagctacttggg

SEQ ID NO: 10699 - DNA, 20 bp, Homo sapiens
ctcagctacttgggaggctg

SEQ ID NO: 10700 - DNA, 20 bp, Homo sapiens
gctacttgggaggctgaggc

SEQ ID NO: 10701 - DNA, 20 bp, Homo sapiens
gcaggataatcgcttgaacc

SEQ ID NO: 10702 - DNA, 20 bp, Homo sapiens
caggataatcgcttgaacct

SEQ ID NO: 10703 - DNA, 20 bp, Homo sapiens
gataatcgcttgaacctggg

SEQ ID NO: 10704 - DNA, 20 bp, Homo sapiens
cactgcagcctctgcctccc

SEQ ID NO: 10705 - DNA, 20 bp, Homo sapiens
cgcttgaacctgggaggcag

SEQ ID NO: 10706 - DNA, 20 bp, Homo sapiens
ggagtacaatggcgtgatct

SEQ ID NO: 10707 - DNA, 20 bp, Homo sapiens
tcgcccaggctggagtacaa

SEQ ID NO: 10708 - DNA, 20 bp, Homo sapiens
cacgccattgtactccagcc

SEQ ID NO: 10709 - DNA, 20 bp, Homo sapiens
acgccattgtactccagcct

SEQ ID NO: 10710 - DNA, 20 bp, Homo sapiens
tctcactctatcgcccaggc

SEQ ID NO: 10711 - DNA, 20 bp, Homo sapiens
agagtctcactctatcgccc

SEQ ID NO: 10712 - DNA, 20 bp, Homo sapiens
aaaataaaataaaataaaat

SEQ ID NO: 10713 - DNA, 20 bp, Homo sapiens
aataggctacagaattaagc

SEQ ID NO: 10714 - DNA, 20 bp, Homo sapiens
ctacagaattaagctggtcc

SEQ ID NO: 10715 - DNA, 20 bp, Homo sapiens
aatggaagccctgtcattcc

SEQ ID NO: 10716 - DNA, 20 bp, Homo sapiens
taagctggtccaggaatgac

SEQ ID NO: 10717 - DNA, 20 bp, Homo sapiens
aagctggtccaggaatgaca

SEQ ID NO: 10718 - DNA, 20 bp, Homo sapiens
acaattgaaagacaaataaa

SEQ ID NO: 10719 - DNA, 20 bp, Homo sapiens
atttatttgtctttcaattg

SEQ ID NO: 10720 - DNA, 20 bp, Homo sapiens
tttatttgtctttcaattgt

SEQ ID NO: 10721 - DNA, 20 bp, Homo sapiens
ctttcaattgtgggagaaaa

SEQ ID NO: 10722 - DNA, 20 bp, Homo sapiens
tgttaaaagatttggagcac

SEQ ID NO: 10723 - DNA, 20 bp, Homo sapiens
taatttaatgttaaaagatt

SEQ ID NO: 10724 - DNA, 20 bp, Homo sapiens
attaaattatgcatttaaac

SEQ ID NO: 10725 - DNA, 20 bp, Homo sapiens
ctttccatattttaagattt

SEQ ID NO: 10726 - DNA, 20 bp, Homo sapiens
tgctcctaaatcttaaaata

SEQ ID NO: 10727 - DNA, 20 bp, Homo sapiens
aatatggaaagcacctcatg

SEQ ID NO: 10728 - DNA, 20 bp, Homo sapiens
tcaaaatatttagcctcatg

SEQ ID NO: 10729 - DNA, 20 bp, Homo sapiens
atcttaccttccagaaaact

SEQ ID NO: 10730 - DNA, 20 bp, Homo sapiens
attttgatgaccaagttttc

SEQ ID NO: 10731 - DNA, 20 bp, Homo sapiens
tgatgaccaagttttctgga

SEQ ID NO: 10732 - DNA, 20 bp, Homo sapiens
tcaaaatctatcacgttaat

SEQ ID NO: 10733 - DNA, 20 bp, Homo sapiens
gcaagtcaacatatatactc

SEQ ID NO: 10734 - DNA, 20 bp, Homo sapiens
gagtaaaacaaaaacaaaaa

SEQ ID NO: 10735 - DNA, 20 bp, Homo sapiens
acaaaaacaaaaatggagta

SEQ ID NO: 10736 - DNA, 20 bp, Homo sapiens
aatggagtaaggagcattgc

SEQ ID NO: 10737 - DNA, 20 bp, Homo sapiens
ggagtaaggagcattgcagg

SEQ ID NO: 10738 - DNA, 20 bp, Homo sapiens
agcattgcaggaggaactag

SEQ ID NO: 10739 - DNA, 20 bp, Homo sapiens
ccccacacacatgcatatca

SEQ ID NO: 10740 - DNA, 20 bp, Homo sapiens
atccatgatatgcatgtgtg

SEQ ID NO: 10741 - DNA, 20 bp, Homo sapiens
tccatgatatgcatgtgtgt

SEQ ID NO: 10742 - DNA, 20 bp, Homo sapiens
ccatgatatgcatgtgtgtg

SEQ ID NO: 10743 - DNA, 20 bp, Homo sapiens
catgatatgcatgtgtgtgg

SEQ ID NO: 10744 - DNA, 20 bp, Homo sapiens
gatatgcatgtgtgtggggg

SEQ ID NO: 10745 - DNA, 20 bp, Homo sapiens
atatgcatgtgtgtggggga

SEQ ID NO: 10746 - DNA, 20 bp, Homo sapiens
tgcatgtgtgtgggggaggg

SEQ ID NO: 10747 - DNA, 20 bp, Homo sapiens
atgtgtgtgggggagggtgg

SEQ ID NO: 10748 - DNA, 20 bp, Homo sapiens
tgtgtgtgggggagggtggc

SEQ ID NO: 10749 - DNA, 20 bp, Homo sapiens
gtgtgtgggggagggtggcg

SEQ ID NO: 10750 - DNA, 20 bp, Homo sapiens
tgtgggggagggtggcgggg

SEQ ID NO: 10751 - DNA, 20 bp, Homo sapiens
gggggagggtggcggggagg

SEQ ID NO: 10752 - DNA, 20 bp, Homo sapiens
gggtggcggggaggtggtaa

SEQ ID NO: 10753 - DNA, 20 bp, Homo sapiens
aatttgaggtatcagggaaa

SEQ ID NO: 10754 - DNA, 20 bp, Homo sapiens
tgaatgaatttgaggtatca

SEQ ID NO: 10755 - DNA, 20 bp, Homo sapiens
ctgaatgaatttgaggtatc

SEQ ID NO: 10756 - DNA, 20 bp, Homo sapiens
cctgactctgaatgaatttg

SEQ ID NO: 10757 - DNA, 20 bp, Homo sapiens
cctcaaattcattcagagtc

SEQ ID NO: 10758 - DNA, 20 bp, Homo sapiens
ctcaaattcattcagagtca

SEQ ID NO: 10759 - DNA, 20 bp, Homo sapiens
agggatgagacagctttcac

SEQ ID NO: 10760 - DNA, 20 bp, Homo sapiens
agatagggggaggggaagtg

SEQ ID NO: 10761 - DNA, 20 bp, Homo sapiens
aggactgcagatagggggag

SEQ ID NO: 10762 - DNA, 20 bp, Homo sapiens
gaggactgcagataggggga

SEQ ID NO: 10763 - DNA, 20 bp, Homo sapiens
tgaggactgcagataggggg

SEQ ID NO: 10764 - DNA, 20 bp, Homo sapiens
cgctgaggactgcagatagg

SEQ ID NO: 10765 - DNA, 20 bp, Homo sapiens
acgctgaggactgcagatag

SEQ ID NO: 10766 - DNA, 20 bp, Homo sapiens
tacgctgaggactgcagata

SEQ ID NO: 10767 - DNA, 20 bp, Homo sapiens
ctacgctgaggactgcagat

SEQ ID NO: 10768 - DNA, 20 bp, Homo sapiens
cagactatttggctacgctg

SEQ ID NO: 10769 - DNA, 20 bp, Homo sapiens
cacccgcatgtcagactatt

SEQ ID NO: 10770 - DNA, 20 bp, Homo sapiens
tagccaaatagtctgacatg

SEQ ID NO: 10771 - DNA, 20 bp, Homo sapiens
agccaaatagtctgacatgc

SEQ ID NO: 10772 - DNA, 20 bp, Homo sapiens
cttccagcttttgcattgtg

SEQ ID NO: 10773 - DNA, 20 bp, Homo sapiens
tcttccagcttttgcattgt

SEQ ID NO: 10774 - DNA, 20 bp, Homo sapiens
ttcttccagcttttgcattg

SEQ ID NO: 10775 - DNA, 20 bp, Homo sapiens
gaaccccacaatgcaaaagc

SEQ ID NO: 10776 - DNA, 20 bp, Homo sapiens
gggttggactccaaggcttg

SEQ ID NO: 10777 - DNA, 20 bp, Homo sapiens
ctggaagaaacctcaagcct

SEQ ID NO: 10778 - DNA, 20 bp, Homo sapiens
aaaaaaggggttggactcca

SEQ ID NO: 10779 - DNA, 20 bp, Homo sapiens
gcatctgtcaaaaaaggggt

SEQ ID NO: 10780 - DNA, 20 bp, Homo sapiens
cttagcatctgtcaaaaaag

SEQ ID NO: 10781 - DNA, 20 bp, Homo sapiens
tcttagcatctgtcaaaaaa

SEQ ID NO: 10782 - DNA, 20 bp, Homo sapiens
ctcttagcatctgtcaaaaa

SEQ ID NO: 10783 - DNA, 20 bp, Homo sapiens
tttttgacagatgctaagag

SEQ ID NO: 10784 - DNA, 20 bp, Homo sapiens
acttatcaagatcttacaac

SEQ ID NO: 10785 - DNA, 20 bp, Homo sapiens
tcccaaagtgctgggatcac

SEQ ID NO: 10786 - DNA, 20 bp, Homo sapiens
cctcagcctcccaaagtgct

SEQ ID NO: 10787 - DNA, 20 bp, Homo sapiens
cgcctgtgatcccagcactt

SEQ ID NO: 10788 - DNA, 20 bp, Homo sapiens
acctcagcctcccaaagtgc

SEQ ID NO: 10789 - DNA, 20 bp, Homo sapiens
gcctgtgatcccagcacttt

SEQ ID NO: 10790 - DNA, 20 bp, Homo sapiens
tgtgatcccagcactttggg

SEQ ID NO: 10791 - DNA, 20 bp, Homo sapiens
cccagcactttgggaggctg

SEQ ID NO: 10792 - DNA, 20 bp, Homo sapiens
agcactttgggaggctgagg

SEQ ID NO: 10793 - DNA, 20 bp, Homo sapiens
gcactttgggaggctgaggt

SEQ ID NO: 10794 - DNA, 20 bp, Homo sapiens
cactttgggaggctgaggtg

SEQ ID NO: 10795 - DNA, 20 bp, Homo sapiens
tgaggtggggcgatcacctg

SEQ ID NO: 10796 - DNA, 20 bp, Homo sapiens
tggggcgatcacctgaggcc

SEQ ID NO: 10797 - DNA, 20 bp, Homo sapiens
ggtctcgaactcctggcctc

SEQ ID NO: 10798 - DNA, 20 bp, Homo sapiens
ccaggctggtctcgaactcc

SEQ ID NO: 10799 - DNA, 20 bp, Homo sapiens
ccaggagttcgagaccagcc

SEQ ID NO: 10800 - DNA, 20 bp, Homo sapiens
tttcgacacgttggccaggc

SEQ ID NO: 10801 - DNA, 20 bp, Homo sapiens
ggggtttcgacacgttggcc

SEQ ID NO: 10802 - DNA, 20 bp, Homo sapiens
gagatggggtttcgacacgt

SEQ ID NO: 10803 - DNA, 20 bp, Homo sapiens
ttgtatttttagtagagatg

SEQ ID NO: 10804 - DNA, 20 bp, Homo sapiens
tttgtatttttagtagagat

SEQ ID NO: 10805 - DNA, 20 bp, Homo sapiens
ttttgtatttttagtagaga

SEQ ID NO: 10806 - DNA, 20 bp, Homo sapiens
ctaaaaatacaaaagttagc

SEQ ID NO: 10807 - DNA, 20 bp, Homo sapiens
taaaaatacaaaagttagct

SEQ ID NO: 10808 - DNA, 20 bp, Homo sapiens
atacaaaagttagctgggtg

SEQ ID NO: 10809 - DNA, 20 bp, Homo sapiens
caaaagttagctgggtgtgg

SEQ ID NO: 10810 - DNA, 20 bp, Homo sapiens
tcctgagtaactgggattac

SEQ ID NO: 10811 - DNA, 20 bp, Homo sapiens
cctcagcctcctgagtaact

SEQ ID NO: 10812 - DNA, 20 bp, Homo sapiens
gcctcagcctcctgagtaac

SEQ ID NO: 10813 - DNA, 20 bp, Homo sapiens
gcctgtaatcccagttactc

SEQ ID NO: 10814 - DNA, 20 bp, Homo sapiens
tgtaatcccagttactcagg

SEQ ID NO: 10815 - DNA, 20 bp, Homo sapiens
cccagttactcaggaggctg

SEQ ID NO: 10816 - DNA, 20 bp, Homo sapiens
gttactcaggaggctgaggc

SEQ ID NO: 10817 - DNA, 20 bp, Homo sapiens
gcaggagaatcacttgaacc

SEQ ID NO: 10818 - DNA, 20 bp, Homo sapiens
caggagaatcacttgaacct

SEQ ID NO: 10819 - DNA, 20 bp, Homo sapiens
cactgcaaacttcgcttccc

SEQ ID NO: 10820 - DNA, 20 bp, Homo sapiens
tcacccaggctggagtgcag

SEQ ID NO: 10821 - DNA, 20 bp, Homo sapiens
catgccactgcactccagcc

SEQ ID NO: 10822 - DNA, 20 bp, Homo sapiens
atgccactgcactccagcct

SEQ ID NO: 10823 - DNA, 20 bp, Homo sapiens
tctcgctctgtcacccaggc

SEQ ID NO: 10824 - DNA, 20 bp, Homo sapiens
aaagtctcgctctgtcaccc

SEQ ID NO: 10825 - DNA, 20 bp, Homo sapiens
attgttttgttttgtttttg

SEQ ID NO: 10826 - DNA, 20 bp, Homo sapiens
gtgtttctctgtaactcact

SEQ ID NO: 10827 - DNA, 20 bp, Homo sapiens
cctgaattaggctcaaagtg

SEQ ID NO: 10828 - DNA, 20 bp, Homo sapiens
ccacactttgagcctaattc

SEQ ID NO: 10829 - DNA, 20 bp, Homo sapiens
taataaaggactcctgaatt

SEQ ID NO: 10830 - DNA, 20 bp, Homo sapiens
tctaggtcgccggctaataa

SEQ ID NO: 10831 - DNA, 20 bp, Homo sapiens
ttcaggagtcctttattagc

SEQ ID NO: 10832 - DNA, 20 bp, Homo sapiens
actagtcgtctctaggtcgc

SEQ ID NO: 10833 - DNA, 20 bp, Homo sapiens
tttgagcactagtcgtctct

SEQ ID NO: 10834 - DNA, 20 bp, Homo sapiens
actagtgctcaaaattctct

SEQ ID NO: 10835 - DNA, 20 bp, Homo sapiens
aattctctcggccccaaaga

SEQ ID NO: 10836 - DNA, 20 bp, Homo sapiens
aaaatctagccccttctttg

SEQ ID NO: 10837 - DNA, 20 bp, Homo sapiens
attctctcggccccaaagaa

SEQ ID NO: 10838 - DNA, 20 bp, Homo sapiens
gaaaatctagccccttcttt

SEQ ID NO: 10839 - DNA, 20 bp, Homo sapiens
ttctctcggccccaaagaag

SEQ ID NO: 10840 - DNA, 20 bp, Homo sapiens
agaaaatctagccccttctt

SEQ ID NO: 10841 - DNA, 20 bp, Homo sapiens
ctagattttcttttatacct

SEQ ID NO: 10842 - DNA, 20 bp, Homo sapiens
ccgctcccctttctaaacca

SEQ ID NO: 10843 - DNA, 20 bp, Homo sapiens
ttttataccttggtttagaa

SEQ ID NO: 10844 - DNA, 20 bp, Homo sapiens
tttataccttggtttagaaa

SEQ ID NO: 10845 - DNA, 20 bp, Homo sapiens
ttataccttggtttagaaag

SEQ ID NO: 10846 - DNA, 20 bp, Homo sapiens
ccttggtttagaaaggggag

SEQ ID NO: 10847 - DNA, 20 bp, Homo sapiens
cttggtttagaaaggggagc

SEQ ID NO: 10848 - DNA, 20 bp, Homo sapiens
caatcttacagaagtaaaac

SEQ ID NO: 10849 - DNA, 20 bp, Homo sapiens
aaaaaagttaaaaagacaaa

SEQ ID NO: 10850 - DNA, 20 bp, Homo sapiens
ttaaaaagacaaatggttac

SEQ ID NO: 10851 - DNA, 20 bp, Homo sapiens
acaggaaaacaaacagttcc

SEQ ID NO: 10852 - DNA, 20 bp, Homo sapiens
aaacaaacagttccaggtgc

SEQ ID NO: 10853 - DNA, 20 bp, Homo sapiens
ggctttaaagctcctgcacc

SEQ ID NO: 10854 - DNA, 20 bp, Homo sapiens
ggagctttaaagccatcaca

SEQ ID NO: 10855 - DNA, 20 bp, Homo sapiens
ccgcacctgtcaccttgtga

SEQ ID NO: 10856 - DNA, 20 bp, Homo sapiens
taaagccatcacaaggtgac

SEQ ID NO: 10857 - DNA, 20 bp, Homo sapiens
ccatcacaaggtgacaggtg

SEQ ID NO: 10858 - DNA, 20 bp, Homo sapiens
catcacaaggtgacaggtgc

SEQ ID NO: 10859 - DNA, 20 bp, Homo sapiens
atcacaaggtgacaggtgcg

SEQ ID NO: 10860 - DNA, 20 bp, Homo sapiens
tcacaaggtgacaggtgcgg

SEQ ID NO: 10861 - DNA, 20 bp, Homo sapiens
ggtgacaggtgcgggggctc

SEQ ID NO: 10862 - DNA, 20 bp, Homo sapiens
gtgacaggtgcgggggctct

SEQ ID NO: 10863 - DNA, 20 bp, Homo sapiens
gggctctgggtgctatctgc

SEQ ID NO: 10864 - DNA, 20 bp, Homo sapiens
agtgcccctgcgtttgtgtc

SEQ ID NO: 10865 - DNA, 20 bp, Homo sapiens
tatctgccggacacaaacgc

SEQ ID NO: 10866 - DNA, 20 bp, Homo sapiens
atctgccggacacaaacgca

SEQ ID NO: 10867 - DNA, 20 bp, Homo sapiens
tctgccggacacaaacgcag

SEQ ID NO: 10868 - DNA, 20 bp, Homo sapiens
ggcactagagtactatcacc

SEQ ID NO: 10869 - DNA, 20 bp, Homo sapiens
gcactagagtactatcaccc

SEQ ID NO: 10870 - DNA, 20 bp, Homo sapiens
cagttcccaggaatttgccc

SEQ ID NO: 10871 - DNA, 20 bp, Homo sapiens
gcagttcccaggaatttgcc

SEQ ID NO: 10872 - DNA, 20 bp, Homo sapiens
ctatcacccgggcaaattcc

SEQ ID NO: 10873 - DNA, 20 bp, Homo sapiens
tatcacccgggcaaattcct

SEQ ID NO: 10874 - DNA, 20 bp, Homo sapiens
aagctgtgtccgcagttccc

SEQ ID NO: 10875 - DNA, 20 bp, Homo sapiens
gggcaaattcctgggaactg

SEQ ID NO: 10876 - DNA, 20 bp, Homo sapiens
aattagctgataaggtactg

SEQ ID NO: 10877 - DNA, 20 bp, Homo sapiens
aagagtgcaattagctgata

SEQ ID NO: 10878 - DNA, 20 bp, Homo sapiens
aattgcactctttgatgtgc

SEQ ID NO: 10879 - DNA, 20 bp, Homo sapiens
attgcactctttgatgtgct

SEQ ID NO: 10880 - DNA, 20 bp, Homo sapiens
ttgcacaagttaagtccttg

SEQ ID NO: 10881 - DNA, 20 bp, Homo sapiens
acaagttaagtccttgagga

SEQ ID NO: 10882 - DNA, 20 bp, Homo sapiens
cttacccacccccttcctca

SEQ ID NO: 10883 - DNA, 20 bp, Homo sapiens
caagttaagtccttgaggaa

SEQ ID NO: 10884 - DNA, 20 bp, Homo sapiens
aagttaagtccttgaggaag

SEQ ID NO: 10885 - DNA, 20 bp, Homo sapiens
agttaagtccttgaggaagg

SEQ ID NO: 10886 - DNA, 20 bp, Homo sapiens
taagtccttgaggaaggggg

SEQ ID NO: 10887 - DNA, 20 bp, Homo sapiens
aagtccttgaggaagggggt

SEQ ID NO: 10888 - DNA, 20 bp, Homo sapiens
cttgaggaagggggtgggta

SEQ ID NO: 10889 - DNA, 20 bp, Homo sapiens
cttcatttgcaagacgttaa

SEQ ID NO: 10890 - DNA, 20 bp, Homo sapiens
ccttcatttgcaagacgtta

SEQ ID NO: 10891 - DNA, 20 bp, Homo sapiens
ccttaacgtcttgcaaatga

SEQ ID NO: 10892 - DNA, 20 bp, Homo sapiens
ttgcaaatgaaggagccgaa

SEQ ID NO: 10893 - DNA, 20 bp, Homo sapiens
aaagccggagggattccatt

SEQ ID NO: 10894 - DNA, 20 bp, Homo sapiens
ggagccgaatggaatccctc

SEQ ID NO: 10895 - DNA, 20 bp, Homo sapiens
tcttagctaagaaagccgga

SEQ ID NO: 10896 - DNA, 20 bp, Homo sapiens
ctcttagctaagaaagccgg

SEQ ID NO: 10897 - DNA, 20 bp, Homo sapiens
tctctcttagctaagaaagc

SEQ ID NO: 10898 - DNA, 20 bp, Homo sapiens
caatcaagttaatacaagtt

SEQ ID NO: 10899 - DNA, 20 bp, Homo sapiens
aatcaagttaatacaagtta

SEQ ID NO: 10900 - DNA, 20 bp, Homo sapiens
ccttgtcttgatggtggtga

SEQ ID NO: 10901 - DNA, 20 bp, Homo sapiens
tgtgctccttgtcttgatgg

SEQ ID NO: 10902 - DNA, 20 bp, Homo sapiens
gggtgtgctccttgtcttga

SEQ ID NO: 10903 - DNA, 20 bp, Homo sapiens
ccatcaccaccatcaagaca

SEQ ID NO: 10904 - DNA, 20 bp, Homo sapiens
aggaagtgtgtggaagtgat

SEQ ID NO: 10905 - DNA, 20 bp, Homo sapiens
gaggaagtgtgtggaagtga

SEQ ID NO: 10906 - DNA, 20 bp, Homo sapiens
aaggagcaggaggaagtgtg

SEQ ID NO: 10907 - DNA, 20 bp, Homo sapiens
aggaatttcaaaggagcagg

SEQ ID NO: 10908 - DNA, 20 bp, Homo sapiens
gggaggaatttcaaaggagc

SEQ ID NO: 10909 - DNA, 20 bp, Homo sapiens
tagggagggaggaatttcaa

SEQ ID NO: 10910 - DNA, 20 bp, Homo sapiens
gaccaggtgggtagggaggg

SEQ ID NO: 10911 - DNA, 20 bp, Homo sapiens
tgggaccaggtgggtaggga

SEQ ID NO: 10912 - DNA, 20 bp, Homo sapiens
gtgggaccaggtgggtaggg

SEQ ID NO: 10913 - DNA, 20 bp, Homo sapiens
tgggtgggaccaggtgggta

SEQ ID NO: 10914 - DNA, 20 bp, Homo sapiens
ttgggtgggaccaggtgggt

SEQ ID NO: 10915 - DNA, 20 bp, Homo sapiens
ttcctccctccctacccacc

SEQ ID NO: 10916 - DNA, 20 bp, Homo sapiens
gcctttgggtgggaccaggt

SEQ ID NO: 10917 - DNA, 20 bp, Homo sapiens
tgcctttgggtgggaccagg

SEQ ID NO: 10918 - DNA, 20 bp, Homo sapiens
ggttgcctttgggtgggacc

SEQ ID NO: 10919 - DNA, 20 bp, Homo sapiens
acccacctggtcccacccaa

SEQ ID NO: 10920 - DNA, 20 bp, Homo sapiens
ttcagtggttgcctttgggt

SEQ ID NO: 10921 - DNA, 20 bp, Homo sapiens
gttcagtggttgcctttggg

SEQ ID NO: 10922 - DNA, 20 bp, Homo sapiens
gtagttcagtggttgccttt

SEQ ID NO: 10923 - DNA, 20 bp, Homo sapiens
agtagttcagtggttgcctt

SEQ ID NO: 10924 - DNA, 20 bp, Homo sapiens
agtgacagaaagtagttcag

SEQ ID NO: 10925 - DNA, 20 bp, Homo sapiens
tgaactactttctgtcacta

SEQ ID NO: 10926 - DNA, 20 bp, Homo sapiens
gtaatttttttgtttgagac

SEQ ID NO: 10927 - DNA, 20 bp, Homo sapiens
taatttttttgtttgagaca

SEQ ID NO: 10928 - DNA, 20 bp, Homo sapiens
ctgcattacggtgtgggtgg

SEQ ID NO: 10929 - DNA, 20 bp, Homo sapiens
ccactgcattacggtgtggg

SEQ ID NO: 10930 - DNA, 20 bp, Homo sapiens
gtgccactgcattacggtgt

SEQ ID NO: 10931 - DNA, 20 bp, Homo sapiens
ggtgccactgcattacggtg

SEQ ID NO: 10932 - DNA, 20 bp, Homo sapiens
atgatggtgccactgcatta

SEQ ID NO: 10933 - DNA, 20 bp, Homo sapiens
ccacccacaccgtaatgcag

SEQ ID NO: 10934 - DNA, 20 bp, Homo sapiens
gtaatgcagtggcaccatca

SEQ ID NO: 10935 - DNA, 20 bp, Homo sapiens
gaggctacagtgagccatga

SEQ ID NO: 10936 - DNA, 20 bp, Homo sapiens
tcctgagcctggggaggttg

SEQ ID NO: 10937 - DNA, 20 bp, Homo sapiens
actgtagcctcaacctcccc

SEQ ID NO: 10938 - DNA, 20 bp, Homo sapiens
aggatctcctgagcctgggg

SEQ ID NO: 10939 - DNA, 20 bp, Homo sapiens
gggaggatctcctgagcctg

SEQ ID NO: 10940 - DNA, 20 bp, Homo sapiens
gcctcaacctccccaggctc

SEQ ID NO: 10941 - DNA, 20 bp, Homo sapiens
ggggaggatctcctgagcct

SEQ ID NO: 10942 - DNA, 20 bp, Homo sapiens
gggggaggatctcctgagcc

SEQ ID NO: 10943 - DNA, 20 bp, Homo sapiens
actcaggaggctgagggggg

SEQ ID NO: 10944 - DNA, 20 bp, Homo sapiens
gctactcaggaggctgaggg

SEQ ID NO: 10945 - DNA, 20 bp, Homo sapiens
agctactcaggaggctgagg

SEQ ID NO: 10946 - DNA, 20 bp, Homo sapiens
tagctactcaggaggctgag

SEQ ID NO: 10947 - DNA, 20 bp, Homo sapiens
ctagctactcaggaggctga

SEQ ID NO: 10948 - DNA, 20 bp, Homo sapiens
cctagctactcaggaggctg

SEQ ID NO: 10949 - DNA, 20 bp, Homo sapiens
tgtggtcctagctactcagg

SEQ ID NO: 10950 - DNA, 20 bp, Homo sapiens
acctgtggtcctagctactc

SEQ ID NO: 10951 - DNA, 20 bp, Homo sapiens
cctcagcctcctgagtagct

SEQ ID NO: 10952 - DNA, 20 bp, Homo sapiens
tcctgagtagctaggaccac

SEQ ID NO: 10953 - DNA, 20 bp, Homo sapiens
gccatggtggcctacacctg

SEQ ID NO: 10954 - DNA, 20 bp, Homo sapiens
gtagctaggaccacaggtgt

SEQ ID NO: 10955 - DNA, 20 bp, Homo sapiens
accacaggtgtaggccacca

SEQ ID NO: 10956 - DNA, 20 bp, Homo sapiens
caaaaattagcctgccatgg

SEQ ID NO: 10957 - DNA, 20 bp, Homo sapiens
caggtgtaggccaccatggc

SEQ ID NO: 10958 - DNA, 20 bp, Homo sapiens
atacaaaaattagcctgcca

SEQ ID NO: 10959 - DNA, 20 bp, Homo sapiens
tttgtatttttttgtagaga

SEQ ID NO: 10960 - DNA, 20 bp, Homo sapiens
ttgtatttttttgtagagat

SEQ ID NO: 10961 - DNA, 20 bp, Homo sapiens
tgtatttttttgtagagatg

SEQ ID NO: 10962 - DNA, 20 bp, Homo sapiens
cgagaccagcctaggtaata

SEQ ID NO: 10963 - DNA, 20 bp, Homo sapiens
ggggtttcaccgtattacct

SEQ ID NO: 10964 - DNA, 20 bp, Homo sapiens
tttcaccgtattacctaggc

SEQ ID NO: 10965 - DNA, 20 bp, Homo sapiens
catgagttcgagaccagcct

SEQ ID NO: 10966 - DNA, 20 bp, Homo sapiens
ctaggctggtctcgaactca

SEQ ID NO: 10967 - DNA, 20 bp, Homo sapiens
taggctggtctcgaactcat

SEQ ID NO: 10968 - DNA, 20 bp, Homo sapiens
ctttgagaggccaaggcagg

SEQ ID NO: 10969 - DNA, 20 bp, Homo sapiens
ttcaagcaatcctcctgcct

SEQ ID NO: 10970 - DNA, 20 bp, Homo sapiens
gcactttgagaggccaaggc

SEQ ID NO: 10971 - DNA, 20 bp, Homo sapiens
cccagcactttgagaggcca

SEQ ID NO: 10972 - DNA, 20 bp, Homo sapiens
tataatcccagcactttgag

SEQ ID NO: 10973 - DNA, 20 bp, Homo sapiens
gccttggcctctcaaagtgc

SEQ ID NO: 10974 - DNA, 20 bp, Homo sapiens
ccttggcctctcaaagtgct

SEQ ID NO: 10975 - DNA, 20 bp, Homo sapiens
tctcaaagtgctgggattat

SEQ ID NO: 10976 - DNA, 20 bp, Homo sapiens
ttacagagggctgggcacag

SEQ ID NO: 10977 - DNA, 20 bp, Homo sapiens
gtgtaacattacagagggct

SEQ ID NO: 10978 - DNA, 20 bp, Homo sapiens
tgtgtaacattacagagggc

SEQ ID NO: 10979 - DNA, 20 bp, Homo sapiens
cctttgtgtaacattacaga

SEQ ID NO: 10980 - DNA, 20 bp, Homo sapiens
ccctttgtgtaacattacag

SEQ ID NO: 10981 - DNA, 20 bp, Homo sapiens
ccctctgtaatgttacacaa

SEQ ID NO: 10982 - DNA, 20 bp, Homo sapiens
cctctgtaatgttacacaaa

SEQ ID NO: 10983 - DNA, 20 bp, Homo sapiens
catgcagcacgtactgccct

SEQ ID NO: 10984 - DNA, 20 bp, Homo sapiens
agcacgtactgcccttggtc

SEQ ID NO: 10985 - DNA, 20 bp, Homo sapiens
agcaaaagaagccagaccaa

SEQ ID NO: 10986 - DNA, 20 bp, Homo sapiens
gagcaaaagaagccagacca

SEQ ID NO: 10987 - DNA, 20 bp, Homo sapiens
gtcagttacacgcaacaaca

SEQ ID NO: 10988 - DNA, 20 bp, Homo sapiens
tctctgcagctgtcagctct

SEQ ID NO: 10989 - DNA, 20 bp, Homo sapiens
ataaagagagattggctgtt

SEQ ID NO: 10990 - DNA, 20 bp, Homo sapiens
gataaagagagattggctgt

SEQ ID NO: 10991 - DNA, 20 bp, Homo sapiens
tgcaggggataaagagagat

SEQ ID NO: 10992 - DNA, 20 bp, Homo sapiens
ataggcaagaacacttgcag

SEQ ID NO: 10993 - DNA, 20 bp, Homo sapiens
aataggcaagaacacttgca

SEQ ID NO: 10994 - DNA, 20 bp, Homo sapiens
aaataggcaagaacacttgc

SEQ ID NO: 10995 - DNA, 20 bp, Homo sapiens
gtaccttgattctgctaaat

SEQ ID NO: 10996 - DNA, 20 bp, Homo sapiens
ttgcctatttagcagaatca

SEQ ID NO: 10997 - DNA, 20 bp, Homo sapiens
ggtactctatcgaaaagact

SEQ ID NO: 10998 - DNA, 20 bp, Homo sapiens
atcgaaaagactcggaaaat

SEQ ID NO: 10999 - DNA, 20 bp, Homo sapiens
aatctattcattcattcctc

SEQ ID NO: 11000 - DNA, 20 bp, Homo sapiens
agttattcgataaatacctg

SEQ ID NO: 11001 - DNA, 20 bp, Homo sapiens
tggttgattagcatagtact

SEQ ID NO: 11002 - DNA, 20 bp, Homo sapiens
agtactatgctaatcaacca

SEQ ID NO: 11003 - DNA, 20 bp, Homo sapiens
tctcctgtttgtgctgtcct

SEQ ID NO: 11004 - DNA, 20 bp, Homo sapiens
caaccaaggacagcacaaac

SEQ ID NO: 11005 - DNA, 20 bp, Homo sapiens
tgcaactcaagtgactgagc

SEQ ID NO: 11006 - DNA, 20 bp, Homo sapiens
gagttgcaataaatatttgc

SEQ ID NO: 11007 - DNA, 20 bp, Homo sapiens
gcaataaatatttgctggat

SEQ ID NO: 11008 - DNA, 20 bp, Homo sapiens
aaatatttgctggataggtc

SEQ ID NO: 11009 - DNA, 20 bp, Homo sapiens
gctggataggtcaggtgcag

SEQ ID NO: 11010 - DNA, 20 bp, Homo sapiens
tcagtaatccccaaagtgct

SEQ ID NO: 11011 - DNA, 20 bp, Homo sapiens
cacttgtaatcccagcactt

SEQ ID NO: 11012 - DNA, 20 bp, Homo sapiens
ctcagtaatccccaaagtgc

SEQ ID NO: 11013 - DNA, 20 bp, Homo sapiens
acttgtaatcccagcacttt

SEQ ID NO: 11014 - DNA, 20 bp, Homo sapiens
cttgtaatcccagcactttg

SEQ ID NO: 11015 - DNA, 20 bp, Homo sapiens
cactttggggattactgaga

SEQ ID NO: 11016 - DNA, 20 bp, Homo sapiens
actttggggattactgagac

SEQ ID NO: 11017 - DNA, 20 bp, Homo sapiens
ttggggattactgagacggg

SEQ ID NO: 11018 - DNA, 20 bp, Homo sapiens
cgggaggatctcttgagccc

SEQ ID NO: 11019 - DNA, 20 bp, Homo sapiens
gaggatctcttgagcccagg

SEQ ID NO: 11020 - DNA, 20 bp, Homo sapiens
ctctgcagccttggcctcct

SEQ ID NO: 11021 - DNA, 20 bp, Homo sapiens
tctctgcagccttggcctcc

SEQ ID NO: 11022 - DNA, 20 bp, Homo sapiens
ctcttgagcccaggaggcca

SEQ ID NO: 11023 - DNA, 20 bp, Homo sapiens
atcatggttctctgcagcct

SEQ ID NO: 11024 - DNA, 20 bp, Homo sapiens
ggagtgcagtggcatgatca

SEQ ID NO: 11025 - DNA, 20 bp, Homo sapiens
tcacccaggctggagtgcag

SEQ ID NO: 11026 - DNA, 20 bp, Homo sapiens
catgccactgcactccagcc

SEQ ID NO: 11027 - DNA, 20 bp, Homo sapiens
atgccactgcactccagcct

SEQ ID NO: 11028 - DNA, 20 bp, Homo sapiens
tctcactctgtcacccaggc

SEQ ID NO: 11029 - DNA, 20 bp, Homo sapiens
aggatctcactctgtcaccc

SEQ ID NO: 11030 - DNA, 20 bp, Homo sapiens
aaatattttttttcagagac

SEQ ID NO: 11031 - DNA, 20 bp, Homo sapiens
ctctgaaaaaaaatatttgc

SEQ ID NO: 11032 - DNA, 20 bp, Homo sapiens
aatatttgctggataaatta

SEQ ID NO: 11033 - DNA, 20 bp, Homo sapiens
tgctgcaatggctactgatg

SEQ ID NO: 11034 - DNA, 20 bp, Homo sapiens
ttgctgcaatggctactgat

SEQ ID NO: 11035 - DNA, 20 bp, Homo sapiens
gttgctgcaatggctactga

SEQ ID NO: 11036 - DNA, 20 bp, Homo sapiens
tagtttacctgttgctgcaa

SEQ ID NO: 11037 - DNA, 20 bp, Homo sapiens
tcagtagccattgcagcaac

SEQ ID NO: 11038 - DNA, 20 bp, Homo sapiens
aactagaacgagtgtgaatt

SEQ ID NO: 11039 - DNA, 20 bp, Homo sapiens
acgagtgtgaatttggaatg

SEQ ID NO: 11040 - DNA, 20 bp, Homo sapiens
ggaatgaggaaacccgatgt

SEQ ID NO: 11041 - DNA, 20 bp, Homo sapiens
acagaatgatggccaacatc

SEQ ID NO: 11042 - DNA, 20 bp, Homo sapiens
tacagaatgatggccaacat

SEQ ID NO: 11043 - DNA, 20 bp, Homo sapiens
tacatgacattacagaatga

SEQ ID NO: 11044 - DNA, 20 bp, Homo sapiens
tattaatgtatgtattatgt

SEQ ID NO: 11045 - DNA, 20 bp, Homo sapiens
gttaccagtgagagaggtca

SEQ ID NO: 11046 - DNA, 20 bp, Homo sapiens
tcttatgttaccagtgagag

SEQ ID NO: 11047 - DNA, 20 bp, Homo sapiens
agttccttgacctctctcac

SEQ ID NO: 11048 - DNA, 20 bp, Homo sapiens
taatctttgtgctacttcac

SEQ ID NO: 11049 - DNA, 20 bp, Homo sapiens
aatctttgtgctacttcact

SEQ ID NO: 11050 - DNA, 20 bp, Homo sapiens
gttattttaaagatcaagtg

SEQ ID NO: 11051 - DNA, 20 bp, Homo sapiens
aaactttcacattcatgtgg

SEQ ID NO: 11052 - DNA, 20 bp, Homo sapiens
aataaactttcacattcatg

SEQ ID NO: 11053 - DNA, 20 bp, Homo sapiens
gaatgtgaaagtttattact

SEQ ID NO: 11054 - DNA, 20 bp, Homo sapiens
aatgtgaaagtttattacta

SEQ ID NO: 11055 - DNA, 20 bp, Homo sapiens
tagggatttagccaaccaca

SEQ ID NO: 11056 - DNA, 20 bp, Homo sapiens
ctcacacattcccttgtggt

SEQ ID NO: 11057 - DNA, 20 bp, Homo sapiens
agggatttagccaaccacaa

SEQ ID NO: 11058 - DNA, 20 bp, Homo sapiens
tatgctcacacattcccttg

SEQ ID NO: 11059 - DNA, 20 bp, Homo sapiens
agcacaaaatcagaaactgt

SEQ ID NO: 11060 - DNA, 20 bp, Homo sapiens
acagtttctgattttgtgct

SEQ ID NO: 11061 - DNA, 20 bp, Homo sapiens
gaggataaaatcaggtaatg

SEQ ID NO: 11062 - DNA, 20 bp, Homo sapiens
gctgttgtgaggataaaatc

SEQ ID NO: 11063 - DNA, 20 bp, Homo sapiens
ttttatgcagggctgttgtg

SEQ ID NO: 11064 - DNA, 20 bp, Homo sapiens
gacatacttacttttatgca

SEQ ID NO: 11065 - DNA, 20 bp, Homo sapiens
cgacatacttacttttatgc

SEQ ID NO: 11066 - DNA, 20 bp, Homo sapiens
taaaagtaagtatgtcgccc

SEQ ID NO: 11067 - DNA, 20 bp, Homo sapiens
gtaagtatgtcgcccaggtg

SEQ ID NO: 11068 - DNA, 20 bp, Homo sapiens
aggcatgagccaccgcacct

SEQ ID NO: 11069 - DNA, 20 bp, Homo sapiens
taggcatgagccaccgcacc

SEQ ID NO: 11070 - DNA, 20 bp, Homo sapiens
agtatgtcgcccaggtgcgg

SEQ ID NO: 11071 - DNA, 20 bp, Homo sapiens
tcccaaagtgctgggattat

SEQ ID NO: 11072 - DNA, 20 bp, Homo sapiens
cctcgggctcccaaagtgct

SEQ ID NO: 11073 - DNA, 20 bp, Homo sapiens
tgcctataatcccagcactt

SEQ ID NO: 11074 - DNA, 20 bp, Homo sapiens
acctcgggctcccaaagtgc

SEQ ID NO: 11075 - DNA, 20 bp, Homo sapiens
gcctataatcccagcacttt

SEQ ID NO: 11076 - DNA, 20 bp, Homo sapiens
cccagcactttgggagcccg

SEQ ID NO: 11077 - DNA, 20 bp, Homo sapiens
agcactttgggagcccgagg

SEQ ID NO: 11078 - DNA, 20 bp, Homo sapiens
gcactttgggagcccgaggt

SEQ ID NO: 11079 - DNA, 20 bp, Homo sapiens
tcaagtgatttgcccacctc

SEQ ID NO: 11080 - DNA, 20 bp, Homo sapiens
ctcaagtgatttgcccacct

SEQ ID NO: 11081 - DNA, 20 bp, Homo sapiens
tgggcaaatcacttgagatc

SEQ ID NO: 11082 - DNA, 20 bp, Homo sapiens
tcaggagtttgaaaccagcc

SEQ ID NO: 11083 - DNA, 20 bp, Homo sapiens
ttgcaccacgttgaccaggc

SEQ ID NO: 11084 - DNA, 20 bp, Homo sapiens
agggttgcaccacgttgacc

SEQ ID NO: 11085 - DNA, 20 bp, Homo sapiens
tgaaaccagcctggtcaacg

SEQ ID NO: 11086 - DNA, 20 bp, Homo sapiens
ttgtatttttagtagagaca

SEQ ID NO: 11087 - DNA, 20 bp, Homo sapiens
tttgtatttttagtagagac

SEQ ID NO: 11088 - DNA, 20 bp, Homo sapiens
aatacaaaaaaaaattagac

SEQ ID NO: 11089 - DNA, 20 bp, Homo sapiens
aaaaaaaaattagacaggcg

SEQ ID NO: 11090 - DNA, 20 bp, Homo sapiens
aaaaaattagacaggcgtgg

SEQ ID NO: 11091 - DNA, 20 bp, Homo sapiens
aaattagacaggcgtggtgg

SEQ ID NO: 11092 - DNA, 20 bp, Homo sapiens
tcccaagtagctgggattac

SEQ ID NO: 11093 - DNA, 20 bp, Homo sapiens
cctcagcttcccaagtagct

SEQ ID NO: 11094 - DNA, 20 bp, Homo sapiens
tgcctgtaatcccagctact

SEQ ID NO: 11095 - DNA, 20 bp, Homo sapiens
gcctcagcttcccaagtagc

SEQ ID NO: 11096 - DNA, 20 bp, Homo sapiens
gcctgtaatcccagctactt

SEQ ID NO: 11097 - DNA, 20 bp, Homo sapiens
cccagctacttgggaagctg

SEQ ID NO: 11098 - DNA, 20 bp, Homo sapiens
gctacttgggaagctgaggc

SEQ ID NO: 11099 - DNA, 20 bp, Homo sapiens
gggaagctgaggcaggagaa

SEQ ID NO: 11100 - DNA, 20 bp, Homo sapiens
gcaggagaatggcttgagcc

SEQ ID NO: 11101 - DNA, 20 bp, Homo sapiens
caggagaatggcttgagccc

SEQ ID NO: 11102 - DNA, 20 bp, Homo sapiens
aatggcttgagcccgggaga

SEQ ID NO: 11103 - DNA, 20 bp, Homo sapiens
cactgcaatctccatctccc

SEQ ID NO: 11104 - DNA, 20 bp, Homo sapiens
tcactgcaatctccatctcc

SEQ ID NO: 11105 - DNA, 20 bp, Homo sapiens
tcacccaggctggagtgcag

SEQ ID NO: 11106 - DNA, 20 bp, Homo sapiens
tgcgccactgcactccagcc

SEQ ID NO: 11107 - DNA, 20 bp, Homo sapiens
gcgccactgcactccagcct

SEQ ID NO: 11108 - DNA, 20 bp, Homo sapiens
ccttgctctgtcacccaggc

SEQ ID NO: 11109 - DNA, 20 bp, Homo sapiens
atagccttgctctgtcaccc

SEQ ID NO: 11110 - DNA, 20 bp, Homo sapiens
ccagcctgggtgacagagca

SEQ ID NO: 11111 - DNA, 20 bp, Homo sapiens
cagtcttgaagatgatgaaa

SEQ ID NO: 11112 - DNA, 20 bp, Homo sapiens
tcttgaagatgatgaaatgg

SEQ ID NO: 11113 - DNA, 20 bp, Homo sapiens
gcaagttacttaatctctct

SEQ ID NO: 11114 - DNA, 20 bp, Homo sapiens
tgcattagttctgtcatttt

SEQ ID NO: 11115 - DNA, 20 bp, Homo sapiens
atgcattagttctgtcattt

SEQ ID NO: 11116 - DNA, 20 bp, Homo sapiens
agaagaaatgtgatgtcttt

SEQ ID NO: 11117 - DNA, 20 bp, Homo sapiens
acgcatatgtggggtgtctt

SEQ ID NO: 11118 - DNA, 20 bp, Homo sapiens
ctgtaaccaacgcatatgtg

SEQ ID NO: 11119 - DNA, 20 bp, Homo sapiens
actgtaaccaacgcatatgt

SEQ ID NO: 11120 - DNA, 20 bp, Homo sapiens
aactgtaaccaacgcatatg

SEQ ID NO: 11121 - DNA, 20 bp, Homo sapiens
aagacaccccacatatgcgt

SEQ ID NO: 11122 - DNA, 20 bp, Homo sapiens
ttctgggggtggggtggggg

SEQ ID NO: 11123 - DNA, 20 bp, Homo sapiens
gatttctgggggtggggtgg

SEQ ID NO: 11124 - DNA, 20 bp, Homo sapiens
agatttctgggggtggggtg

SEQ ID NO: 11125 - DNA, 20 bp, Homo sapiens
aagatttctgggggtggggt

SEQ ID NO: 11126 - DNA, 20 bp, Homo sapiens
gaagatttctgggggtgggg

SEQ ID NO: 11127 - DNA, 20 bp, Homo sapiens
tcagaagatttctgggggtg

SEQ ID NO: 11128 - DNA, 20 bp, Homo sapiens
gtcagaagatttctgggggt

SEQ ID NO: 11129 - DNA, 20 bp, Homo sapiens
agtcagaagatttctggggg

SEQ ID NO: 11130 - DNA, 20 bp, Homo sapiens
acaagtcagaagatttctgg

SEQ ID NO: 11131 - DNA, 20 bp, Homo sapiens
aacaagtcagaagatttctg

SEQ ID NO: 11132 - DNA, 20 bp, Homo sapiens
aaacaagtcagaagatttct

SEQ ID NO: 11133 - DNA, 20 bp, Homo sapiens
aaaacaagtcagaagatttc

SEQ ID NO: 11134 - DNA, 20 bp, Homo sapiens
ttgttttctcgcagttgagt

SEQ ID NO: 11135 - DNA, 20 bp, Homo sapiens
gttgagtaggaccatttatt

SEQ ID NO: 11136 - DNA, 20 bp, Homo sapiens
atggtacactgccgaataaa

SEQ ID NO: 11137 - DNA, 20 bp, Homo sapiens
tttcaactgcaagctgagaa

SEQ ID NO: 11138 - DNA, 20 bp, Homo sapiens
ttgcctctttaatggatatt

SEQ ID NO: 11139 - DNA, 20 bp, Homo sapiens
aagccaaatatccattaaag

SEQ ID NO: 11140 - DNA, 20 bp, Homo sapiens
ttgcatccttgcctctttaa

SEQ ID NO: 11141 - DNA, 20 bp, Homo sapiens
aaatatccattaaagaggca

SEQ ID NO: 11142 - DNA, 20 bp, Homo sapiens
cttgctaagctgataaatcc

SEQ ID NO: 11143 - DNA, 20 bp, Homo sapiens
ttgctaagctgataaatcca

SEQ ID NO: 11144 - DNA, 20 bp, Homo sapiens
tgctaagctgataaatccag

SEQ ID NO: 11145 - DNA, 20 bp, Homo sapiens
aaaaaaaaaaaaatcacccc

SEQ ID NO: 11146 - DNA, 20 bp, Homo sapiens
atttaaaatgtcttgttgga

SEQ ID NO: 11147 - DNA, 20 bp, Homo sapiens
gagtatttaaaatgtcttgt

SEQ ID NO: 11148 - DNA, 20 bp, Homo sapiens
atttcatagaactgactgcc

SEQ ID NO: 11149 - DNA, 20 bp, Homo sapiens
atagaactgactgccaggat

SEQ ID NO: 11150 - DNA, 20 bp, Homo sapiens
ctttaatgtctttccaatcc

SEQ ID NO: 11151 - DNA, 20 bp, Homo sapiens
cagcgaggcagtggctgagc

SEQ ID NO: 11152 - DNA, 20 bp, Homo sapiens
ctggccaaccagcgaggcag

SEQ ID NO: 11153 - DNA, 20 bp, Homo sapiens
cagctcagccactgcctcgc

SEQ ID NO: 11154 - DNA, 20 bp, Homo sapiens
cgtggtctggccaaccagcg

SEQ ID NO: 11155 - DNA, 20 bp, Homo sapiens
tcagccactgcctcgctggt

SEQ ID NO: 11156 - DNA, 20 bp, Homo sapiens
cagaagtgccaggcgtggtc

SEQ ID NO: 11157 - DNA, 20 bp, Homo sapiens
ctggttggccagaccacgcc

SEQ ID NO: 11158 - DNA, 20 bp, Homo sapiens
cctcccagaagtgccaggcg

SEQ ID NO: 11159 - DNA, 20 bp, Homo sapiens
tgctccctcccagaagtgcc

SEQ ID NO: 11160 - DNA, 20 bp, Homo sapiens
cagaccacgcctggcacttc

SEQ ID NO: 11161 - DNA, 20 bp, Homo sapiens
agaccacgcctggcacttct

SEQ ID NO: 11162 - DNA, 20 bp, Homo sapiens
ccacgcctggcacttctggg

SEQ ID NO: 11163 - DNA, 20 bp, Homo sapiens
cacgcctggcacttctggga

SEQ ID NO: 11164 - DNA, 20 bp, Homo sapiens
agatgggtgcccttgggggg

SEQ ID NO: 11165 - DNA, 20 bp, Homo sapiens
ggagcactcaccacccccca

SEQ ID NO: 11166 - DNA, 20 bp, Homo sapiens
gagcactcaccaccccccaa

SEQ ID NO: 11167 - DNA, 20 bp, Homo sapiens
atgagatgggtgcccttggg

SEQ ID NO: 11168 - DNA, 20 bp, Homo sapiens
gatgagatgggtgcccttgg

SEQ ID NO: 11169 - DNA, 20 bp, Homo sapiens
ggatgagatgggtgcccttg

SEQ ID NO: 11170 - DNA, 20 bp, Homo sapiens
aggatgagatgggtgccctt

SEQ ID NO: 11171 - DNA, 20 bp, Homo sapiens
gaggatgagatgggtgccct

SEQ ID NO: 11172 - DNA, 20 bp, Homo sapiens
aaaccttcggaggatgagat

SEQ ID NO: 11173 - DNA, 20 bp, Homo sapiens
taaaccttcggaggatgaga

SEQ ID NO: 11174 - DNA, 20 bp, Homo sapiens
gcacccatctcatcctccga

SEQ ID NO: 11175 - DNA, 20 bp, Homo sapiens
gcattttcataaaccttcgg

SEQ ID NO: 11176 - DNA, 20 bp, Homo sapiens
agtgcattttcataaacctt

SEQ ID NO: 11177 - DNA, 20 bp, Homo sapiens
aaattaggtaatacacgtag

SEQ ID NO: 11178 - DNA, 20 bp, Homo sapiens
ttcacatcgtgtcacaaatt

SEQ ID NO: 11179 - DNA, 20 bp, Homo sapiens
tttatttagaattatctctc

SEQ ID NO: 11180 - DNA, 20 bp, Homo sapiens
ttctaaataaaatatagtta

SEQ ID NO: 11181 - DNA, 20 bp, Homo sapiens
tctaaataaaatatagttat

SEQ ID NO: 11182 - DNA, 20 bp, Homo sapiens
aaatatagttatgggtctca

SEQ ID NO: 11183 - DNA, 20 bp, Homo sapiens
ggataggagattagcatatc

SEQ ID NO: 11184 - DNA, 20 bp, Homo sapiens
actgtaaactgcaggaggat

SEQ ID NO: 11185 - DNA, 20 bp, Homo sapiens
ggaccactgtaaactgcagg

SEQ ID NO: 11186 - DNA, 20 bp, Homo sapiens
tgaggaccactgtaaactgc

SEQ ID NO: 11187 - DNA, 20 bp, Homo sapiens
tatcctcctgcagtttacag

SEQ ID NO: 11188 - DNA, 20 bp, Homo sapiens
ttgtaaataagtatctggtg

SEQ ID NO: 11189 - DNA, 20 bp, Homo sapiens
aatttttgtaaataagtatc

SEQ ID NO: 11190 - DNA, 20 bp, Homo sapiens
agagtcttgctctatagctc

SEQ ID NO: 11191 - DNA, 20 bp, Homo sapiens
tagctcaggctagagtgtaa

SEQ ID NO: 11192 - DNA, 20 bp, Homo sapiens
agagtgtaatggtgtgatct

SEQ ID NO: 11193 - DNA, 20 bp, Homo sapiens
cacttgaacctgggaggcag

SEQ ID NO: 11194 - DNA, 20 bp, Homo sapiens
cacttcaacctctgcctccc

SEQ ID NO: 11195 - DNA, 20 bp, Homo sapiens
gagaatcacttgaacctggg

SEQ ID NO: 11196 - DNA, 20 bp, Homo sapiens
caggagaatcacttgaacct

SEQ ID NO: 11197 - DNA, 20 bp, Homo sapiens
gcaggagaatcacttgaacc

SEQ ID NO: 11198 - DNA, 20 bp, Homo sapiens
gctacttgggaggttgaggc

SEQ ID NO: 11199 - DNA, 20 bp, Homo sapiens
cccagctacttgggaggttg

SEQ ID NO: 11200 - DNA, 20 bp, Homo sapiens
tgtagtcccagctacttggg

SEQ ID NO: 11201 - DNA, 20 bp, Homo sapiens
gcctgtagtcccagctactt

SEQ ID NO: 11202 - DNA, 20 bp, Homo sapiens
gcctcaacctcccaagtagc

SEQ ID NO: 11203 - DNA, 20 bp, Homo sapiens
tgcctgtagtcccagctact

SEQ ID NO: 11204 - DNA, 20 bp, Homo sapiens
cctcaacctcccaagtagct

SEQ ID NO: 11205 - DNA, 20 bp, Homo sapiens
tcccaagtagctgggactac

SEQ ID NO: 11206 - DNA, 20 bp, Homo sapiens
caaaaattagccgtggtggc

SEQ ID NO: 11207 - DNA, 20 bp, Homo sapiens
actacaggcacctgccacca

SEQ ID NO: 11208 - DNA, 20 bp, Homo sapiens
actccaaaaattagccgtgg

SEQ ID NO: 11209 - DNA, 20 bp, Homo sapiens
aaaactccaaaaattagccg

SEQ ID NO: 11210 - DNA, 20 bp, Homo sapiens
ctgccaccacggctaatttt

SEQ ID NO: 11211 - DNA, 20 bp, Homo sapiens
tttggagttttagtagagac

SEQ ID NO: 11212 - DNA, 20 bp, Homo sapiens
ttggagttttagtagagaca

SEQ ID NO: 11213 - DNA, 20 bp, Homo sapiens
gagacagggtttcaccacgt

SEQ ID NO: 11214 - DNA, 20 bp, Homo sapiens
cgaggccagcctggccaacg

SEQ ID NO: 11215 - DNA, 20 bp, Homo sapiens
agggtttcaccacgttggcc

SEQ ID NO: 11216 - DNA, 20 bp, Homo sapiens
tttcaccacgttggccaggc

SEQ ID NO: 11217 - DNA, 20 bp, Homo sapiens
tcaggagttcgaggccagcc

SEQ ID NO: 11218 - DNA, 20 bp, Homo sapiens
cacctgaggtcaggagttcg

SEQ ID NO: 11219 - DNA, 20 bp, Homo sapiens
ggcctcgaactcctgacctc

SEQ ID NO: 11220 - DNA, 20 bp, Homo sapiens
tgggcagatcacctgaggtc

SEQ ID NO: 11221 - DNA, 20 bp, Homo sapiens
tgatgtgggcagatcacctg

SEQ ID NO: 11222 - DNA, 20 bp, Homo sapiens
acattttgggaggctgatgt

SEQ ID NO: 11223 - DNA, 20 bp, Homo sapiens
aacattttgggaggctgatg

SEQ ID NO: 11224 - DNA, 20 bp, Homo sapiens
tgtaatcccaacattttggg

SEQ ID NO: 11225 - DNA, 20 bp, Homo sapiens
gcctgtaatcccaacatttt

SEQ ID NO: 11226 - DNA, 20 bp, Homo sapiens
acatcagcctcccaaaatgt

SEQ ID NO: 11227 - DNA, 20 bp, Homo sapiens
cgcctgtaatcccaacattt

SEQ ID NO: 11228 - DNA, 20 bp, Homo sapiens
catcagcctcccaaaatgtt

SEQ ID NO: 11229 - DNA, 20 bp, Homo sapiens
tcccaaaatgttgggattac

SEQ ID NO: 11230 - DNA, 20 bp, Homo sapiens
gaagttttggccgggcatgg

SEQ ID NO: 11231 - DNA, 20 bp, Homo sapiens
caggcgtgagccaccatgcc

SEQ ID NO: 11232 - DNA, 20 bp, Homo sapiens
actgaagttttggccgggca

SEQ ID NO: 11233 - DNA, 20 bp, Homo sapiens
tataaactgaagttttggcc

SEQ ID NO: 11234 - DNA, 20 bp, Homo sapiens
ttataaactgaagttttggc

SEQ ID NO: 11235 - DNA, 20 bp, Homo sapiens
tgtgttataaactgaagttt

SEQ ID NO: 11236 - DNA, 20 bp, Homo sapiens
tattaaactgaaataaagaa

SEQ ID NO: 11237 - DNA, 20 bp, Homo sapiens
ttattaaactgaaataaaga

SEQ ID NO: 11238 - DNA, 20 bp, Homo sapiens
tatttcagtttaataaacca

SEQ ID NO: 11239 - DNA, 20 bp, Homo sapiens
aaagcatgaaataaaatcca

SEQ ID NO: 11240 - DNA, 20 bp, Homo sapiens
ttcatgctttgcaaaacaca

SEQ ID NO: 11241 - DNA, 20 bp, Homo sapiens
tcatgctttgcaaaacacaa

SEQ ID NO: 11242 - DNA, 20 bp, Homo sapiens
tgcacttcttaaactaattc

SEQ ID NO: 11243 - DNA, 20 bp, Homo sapiens
cttcttaaactaattctggc

SEQ ID NO: 11244 - DNA, 20 bp, Homo sapiens
tcccaaagtgctggaattac

SEQ ID NO: 11245 - DNA, 20 bp, Homo sapiens
cgcctgtaattccagcactt

SEQ ID NO: 11246 - DNA, 20 bp, Homo sapiens
gcctcagcctcccaaagtgc

SEQ ID NO: 11247 - DNA, 20 bp, Homo sapiens
gcctgtaattccagcacttt

SEQ ID NO: 11248 - DNA, 20 bp, Homo sapiens
tgtaattccagcactttggg

SEQ ID NO: 11249 - DNA, 20 bp, Homo sapiens
tccagcactttgggaggctg

SEQ ID NO: 11250 - DNA, 20 bp, Homo sapiens
cctgacttgaagtgatctgt

SEQ ID NO: 11251 - DNA, 20 bp, Homo sapiens
ccgacagatcacttcaagtc

SEQ ID NO: 11252 - DNA, 20 bp, Homo sapiens
tcaggagttcaagaccagcc

SEQ ID NO: 11253 - DNA, 20 bp, Homo sapiens
tttcaccatattggccaggc

SEQ ID NO: 11254 - DNA, 20 bp, Homo sapiens
gtggtttcaccatattggcc

SEQ ID NO: 11255 - DNA, 20 bp, Homo sapiens
caagaccagcctggccaata

SEQ ID NO: 11256 - DNA, 20 bp, Homo sapiens
gagacgtggtttcaccatat

SEQ ID NO: 11257 - DNA, 20 bp, Homo sapiens
ttatatttttggtagagacg

SEQ ID NO: 11258 - DNA, 20 bp, Homo sapiens
tggctaattttttatatttt

SEQ ID NO: 11259 - DNA, 20 bp, Homo sapiens
aaaaatataaaaaattagcc

SEQ ID NO: 11260 - DNA, 20 bp, Homo sapiens
tataaaaaattagccaggtg

SEQ ID NO: 11261 - DNA, 20 bp, Homo sapiens
tagtcacgcaccaccacacc

SEQ ID NO: 11262 - DNA, 20 bp, Homo sapiens
aaaaaattagccaggtgtgg

SEQ ID NO: 11263 - DNA, 20 bp, Homo sapiens
cctcaggcccctgagtagct

SEQ ID NO: 11264 - DNA, 20 bp, Homo sapiens
gcctcaggcccctgagtagc

SEQ ID NO: 11265 - DNA, 20 bp, Homo sapiens
gactataatcccagctactc

SEQ ID NO: 11266 - DNA, 20 bp, Homo sapiens
actataatcccagctactca

SEQ ID NO: 11267 - DNA, 20 bp, Homo sapiens
ctataatcccagctactcag

SEQ ID NO: 11268 - DNA, 20 bp, Homo sapiens
cccagctactcaggggcctg

SEQ ID NO: 11269 - DNA, 20 bp, Homo sapiens
tcaagtgatttttctgcctc

SEQ ID NO: 11270 - DNA, 20 bp, Homo sapiens
gcagaaaaatcacttgaacc

SEQ ID NO: 11271 - DNA, 20 bp, Homo sapiens
cagaaaaatcacttgaaccc

SEQ ID NO: 11272 - DNA, 20 bp, Homo sapiens
aaaaatcacttgaacccggg

SEQ ID NO: 11273 - DNA, 20 bp, Homo sapiens
aatcacttgaacccgggagg

SEQ ID NO: 11274 - DNA, 20 bp, Homo sapiens
cactgtaacctccgcctccc

SEQ ID NO: 11275 - DNA, 20 bp, Homo sapiens
tcactgtaacctccgcctcc

SEQ ID NO: 11276 - DNA, 20 bp, Homo sapiens
cacttgaacccgggaggcgg

SEQ ID NO: 11277 - DNA, 20 bp, Homo sapiens
tcgcccaggctggagtgcag

SEQ ID NO: 11278 - DNA, 20 bp, Homo sapiens
cgcgccactgcactccagcc

SEQ ID NO: 11279 - DNA, 20 bp, Homo sapiens
gcgccactgcactccagcct

SEQ ID NO: 11280 - DNA, 20 bp, Homo sapiens
tctcactctgtcgcccaggc

SEQ ID NO: 11281 - DNA, 20 bp, Homo sapiens
agagtctcactctgtcgccc

SEQ ID NO: 11282 - DNA, 20 bp, Homo sapiens
aaatacgaaacaagcaatcc

SEQ ID NO: 11283 - DNA, 20 bp, Homo sapiens
tcattccagcagctactgcc

SEQ ID NO: 11284 - DNA, 20 bp, Homo sapiens
gcaatcctggcagtagctgc

SEQ ID NO: 11285 - DNA, 20 bp, Homo sapiens
gcagtagctgctggaatgag

SEQ ID NO: 11286 - DNA, 20 bp, Homo sapiens
gtagctgctggaatgagagg

SEQ ID NO: 11287 - DNA, 20 bp, Homo sapiens
tagctgctggaatgagagga

SEQ ID NO: 11288 - DNA, 20 bp, Homo sapiens
gctggaatgagaggagggag

SEQ ID NO: 11289 - DNA, 20 bp, Homo sapiens
tgagaggagggagaggtcat

SEQ ID NO: 11290 - DNA, 20 bp, Homo sapiens
gagaggagggagaggtcata

SEQ ID NO: 11291 - DNA, 20 bp, Homo sapiens
aggagggagaggtcataggg

SEQ ID NO: 11292 - DNA, 20 bp, Homo sapiens
gggagaggtcatagggaggt

SEQ ID NO: 11293 - DNA, 20 bp, Homo sapiens
ggagaggtcatagggaggtc

SEQ ID NO: 11294 - DNA, 20 bp, Homo sapiens
gagaggtcatagggaggtcg

SEQ ID NO: 11295 - DNA, 20 bp, Homo sapiens
catagggaggtcggggacaa

SEQ ID NO: 11296 - DNA, 20 bp, Homo sapiens
aggtcggggacaatggagca

SEQ ID NO: 11297 - DNA, 20 bp, Homo sapiens
aatggagcatggagttgtgt

SEQ ID NO: 11298 - DNA, 20 bp, Homo sapiens
gcatggagttgtgttggatt

SEQ ID NO: 11299 - DNA, 20 bp, Homo sapiens
gttggatttggctaagcagc

SEQ ID NO: 11300 - DNA, 20 bp, Homo sapiens
gctaagcagcaggaagtgca

SEQ ID NO: 11301 - DNA, 20 bp, Homo sapiens
tgcaaggcattccaagcaag

SEQ ID NO: 11302 - DNA, 20 bp, Homo sapiens
cctgcccccctcctcttgct

SEQ ID NO: 11303 - DNA, 20 bp, Homo sapiens
aaggcattccaagcaagagg

SEQ ID NO: 11304 - DNA, 20 bp, Homo sapiens
aggcattccaagcaagagga

SEQ ID NO: 11305 - DNA, 20 bp, Homo sapiens
ggcattccaagcaagaggag

SEQ ID NO: 11306 - DNA, 20 bp, Homo sapiens
gcattccaagcaagaggagg

SEQ ID NO: 11307 - DNA, 20 bp, Homo sapiens
cattccaagcaagaggaggg

SEQ ID NO: 11308 - DNA, 20 bp, Homo sapiens
ccaagcaagaggaggggggc

SEQ ID NO: 11309 - DNA, 20 bp, Homo sapiens
agcaagaggaggggggcagg

SEQ ID NO: 11310 - DNA, 20 bp, Homo sapiens
gcaagaggaggggggcaggt

SEQ ID NO: 11311 - DNA, 20 bp, Homo sapiens
caagaggaggggggcaggtg

SEQ ID NO: 11312 - DNA, 20 bp, Homo sapiens
cagaagcagcatgagcaacc

SEQ ID NO: 11313 - DNA, 20 bp, Homo sapiens
gcagcatgagcaacctggct

SEQ ID NO: 11314 - DNA, 20 bp, Homo sapiens
ttttcacacactgccgagcc

SEQ ID NO: 11315 - DNA, 20 bp, Homo sapiens
tggctcggcagtgtgtgaaa

SEQ ID NO: 11316 - DNA, 20 bp, Homo sapiens
cagtgtgtgaaaaggctgaa

SEQ ID NO: 11317 - DNA, 20 bp, Homo sapiens
tgtgtgaaaaggctgaaagg

SEQ ID NO: 11318 - DNA, 20 bp, Homo sapiens
cctgaaggatgaaattgaag

SEQ ID NO: 11319 - DNA, 20 bp, Homo sapiens
ccacttcaatttcatccttc

SEQ ID NO: 11320 - DNA, 20 bp, Homo sapiens
ggaatttcccatttgcctga

SEQ ID NO: 11321 - DNA, 20 bp, Homo sapiens
aatttcatccttcaggcaaa

SEQ ID NO: 11322 - DNA, 20 bp, Homo sapiens
atttcatccttcaggcaaat

SEQ ID NO: 11323 - DNA, 20 bp, Homo sapiens
ggcaaatgggaaattcccaa

SEQ ID NO: 11324 - DNA, 20 bp, Homo sapiens
gcttccccactcaaaccttt

SEQ ID NO: 11325 - DNA, 20 bp, Homo sapiens
tgcttccccactcaaacctt

SEQ ID NO: 11326 - DNA, 20 bp, Homo sapiens
gaaattcccaaaggtttgag

SEQ ID NO: 11327 - DNA, 20 bp, Homo sapiens
aaattcccaaaggtttgagt

SEQ ID NO: 11328 - DNA, 20 bp, Homo sapiens
aattcccaaaggtttgagtg

SEQ ID NO: 11329 - DNA, 20 bp, Homo sapiens
cactctcaaactttcattgt

SEQ ID NO: 11330 - DNA, 20 bp, Homo sapiens
agtgatcgaattaagcatgt

SEQ ID NO: 11331 - DNA, 20 bp, Homo sapiens
attgcagttatttcagaact

SEQ ID NO: 11332 - DNA, 20 bp, Homo sapiens
atgtgctgaagatcatccat

SEQ ID NO: 11333 - DNA, 20 bp, Homo sapiens
aatactcattcagaagccaa

SEQ ID NO: 11334 - DNA, 20 bp, Homo sapiens
acagtagtgtttatctttct

SEQ ID NO: 11335 - DNA, 20 bp, Homo sapiens
aaagataaacactactgttt

SEQ ID NO: 11336 - DNA, 20 bp, Homo sapiens
cttcgcgtaaaacagcaaga

SEQ ID NO: 11337 - DNA, 20 bp, Homo sapiens
acttcgcgtaaaacagcaag

SEQ ID NO: 11338 - DNA, 20 bp, Homo sapiens
aaaatctactcttgtcacag

SEQ ID NO: 11339 - DNA, 20 bp, Homo sapiens
ttatttgaaatcagaagtag

SEQ ID NO: 11340 - DNA, 20 bp, Homo sapiens
tttatttgaaatcagaagta

SEQ ID NO: 11341 - DNA, 20 bp, Homo sapiens
atttatttgaaatcagaagt

SEQ ID NO: 11342 - DNA, 20 bp, Homo sapiens
aatgttctagagacacagta

SEQ ID NO: 11343 - DNA, 20 bp, Homo sapiens
atgttctagagacacagtaa

SEQ ID NO: 11344 - DNA, 20 bp, Homo sapiens
ttgttgaacaagcgtttgtt

SEQ ID NO: 11345 - DNA, 20 bp, Homo sapiens
gttgttgaacaagcgtttgt

SEQ ID NO: 11346 - DNA, 20 bp, Homo sapiens
aacgcttgttcaacaacaca

SEQ ID NO: 11347 - DNA, 20 bp, Homo sapiens
tgttttcctactttaaaagc

SEQ ID NO: 11348 - DNA, 20 bp, Homo sapiens
ggagagccagcttttaaagt

SEQ ID NO: 11349 - DNA, 20 bp, Homo sapiens
agcttttaaagtaggaaaac

SEQ ID NO: 11350 - DNA, 20 bp, Homo sapiens
tttaaagtaggaaaacaggc

SEQ ID NO: 11351 - DNA, 20 bp, Homo sapiens
ttaaagtaggaaaacaggcc

SEQ ID NO: 11352 - DNA, 20 bp, Homo sapiens
caggtgtgagccacggcgcc

SEQ ID NO: 11353 - DNA, 20 bp, Homo sapiens
ggaaaacaggccgggcgccg

SEQ ID NO: 11354 - DNA, 20 bp, Homo sapiens
gggattacaggtgtgagcca

SEQ ID NO: 11355 - DNA, 20 bp, Homo sapiens
tcccaaagtgttgggattac

SEQ ID NO: 11356 - DNA, 20 bp, Homo sapiens
cctcagcctcccaaagtgtt

SEQ ID NO: 11357 - DNA, 20 bp, Homo sapiens
cacctgtaatcccaacactt

SEQ ID NO: 11358 - DNA, 20 bp, Homo sapiens
acctcagcctcccaaagtgt

SEQ ID NO: 11359 - DNA, 20 bp, Homo sapiens
acctgtaatcccaacacttt

SEQ ID NO: 11360 - DNA, 20 bp, Homo sapiens
tgtaatcccaacactttggg

SEQ ID NO: 11361 - DNA, 20 bp, Homo sapiens
cccaacactttgggaggctg

SEQ ID NO: 11362 - DNA, 20 bp, Homo sapiens
aacactttgggaggctgagg

SEQ ID NO: 11363 - DNA, 20 bp, Homo sapiens
acactttgggaggctgaggt

SEQ ID NO: 11364 - DNA, 20 bp, Homo sapiens
tgaggtgggcagatcacttg

SEQ ID NO: 11365 - DNA, 20 bp, Homo sapiens
tgggcagatcacttgaggtc

SEQ ID NO: 11366 - DNA, 20 bp, Homo sapiens
tcaggagttcaagaacagct

SEQ ID NO: 11367 - DNA, 20 bp, Homo sapiens
caagaacagcttggccaaca

SEQ ID NO: 11368 - DNA, 20 bp, Homo sapiens
gagacagggtttcaccatgt

SEQ ID NO: 11369 - DNA, 20 bp, Homo sapiens
ttgtgtttttagtagagaca

SEQ ID NO: 11370 - DNA, 20 bp, Homo sapiens
tttgtgtttttagtagagac

SEQ ID NO: 11371 - DNA, 20 bp, Homo sapiens
taaaaacacaaacattagcc

SEQ ID NO: 11372 - DNA, 20 bp, Homo sapiens
acacaaacattagccaggcg

SEQ ID NO: 11373 - DNA, 20 bp, Homo sapiens
ctggtgtgcaccaccacgcc

SEQ ID NO: 11374 - DNA, 20 bp, Homo sapiens
caaacattagccaggcgtgg

SEQ ID NO: 11375 - DNA, 20 bp, Homo sapiens
tcctgaatagctgggactac

SEQ ID NO: 11376 - DNA, 20 bp, Homo sapiens
cctcagcctcctgaatagct

SEQ ID NO: 11377 - DNA, 20 bp, Homo sapiens
gcctcagcctcctgaatagc

SEQ ID NO: 11378 - DNA, 20 bp, Homo sapiens
accagtagtcccagctattc

SEQ ID NO: 11379 - DNA, 20 bp, Homo sapiens
agtagtcccagctattcagg

SEQ ID NO: 11380 - DNA, 20 bp, Homo sapiens
cccagctattcaggaggctg

SEQ ID NO: 11381 - DNA, 20 bp, Homo sapiens
gctattcaggaggctgaggc

SEQ ID NO: 11382 - DNA, 20 bp, Homo sapiens
aggaggctgaggcaggaaaa

SEQ ID NO: 11383 - DNA, 20 bp, Homo sapiens
ggcaggaaaatggcttgaac

SEQ ID NO: 11384 - DNA, 20 bp, Homo sapiens
gcaggaaaatggcttgaact

SEQ ID NO: 11385 - DNA, 20 bp, Homo sapiens
caggaaaatggcttgaactg

SEQ ID NO: 11386 - DNA, 20 bp, Homo sapiens
gaaaatggcttgaactgggg

SEQ ID NO: 11387 - DNA, 20 bp, Homo sapiens
ggagtgcagtggcacgatct

SEQ ID NO: 11388 - DNA, 20 bp, Homo sapiens
tcccccaggctggagtgcag

SEQ ID NO: 11389 - DNA, 20 bp, Homo sapiens
cgtgccactgcactccagcc

SEQ ID NO: 11390 - DNA, 20 bp, Homo sapiens
gtgccactgcactccagcct

SEQ ID NO: 11391 - DNA, 20 bp, Homo sapiens
tgccactgcactccagcctg

SEQ ID NO: 11392 - DNA, 20 bp, Homo sapiens
gccactgcactccagcctgg

SEQ ID NO: 11393 - DNA, 20 bp, Homo sapiens
tctccctctgtcccccaggc

SEQ ID NO: 11394 - DNA, 20 bp, Homo sapiens
ggagtctccctctgtccccc

SEQ ID NO: 11395 - DNA, 20 bp, Homo sapiens
cactccagcctgggggacag

SEQ ID NO: 11396 - DNA, 20 bp, Homo sapiens
actccagcctgggggacaga

SEQ ID NO: 11397 - DNA, 20 bp, Homo sapiens
tgttttgttttattttgaga

SEQ ID NO: 11398 - DNA, 20 bp, Homo sapiens
gctaatgtttttgtatgatt

SEQ ID NO: 11399 - DNA, 20 bp, Homo sapiens
aatcatacaaaaacattagc

SEQ ID NO: 11400 - DNA, 20 bp, Homo sapiens
atcatacaaaaacattagct

SEQ ID NO: 11401 - DNA, 20 bp, Homo sapiens
acaaaaacattagctgggtg

SEQ ID NO: 11402 - DNA, 20 bp, Homo sapiens
aaaacattagctgggtgtgg

SEQ ID NO: 11403 - DNA, 20 bp, Homo sapiens
tcccaagtagctgggattac

SEQ ID NO: 11404 - DNA, 20 bp, Homo sapiens
cctcagcttcccaagtagct

SEQ ID NO: 11405 - DNA, 20 bp, Homo sapiens
tacctgtaatcccagctact

SEQ ID NO: 11406 - DNA, 20 bp, Homo sapiens
gcctcagcttcccaagtagc

SEQ ID NO: 11407 - DNA, 20 bp, Homo sapiens
acctgtaatcccagctactt

SEQ ID NO: 11408 - DNA, 20 bp, Homo sapiens
cccagctacttgggaagctg

SEQ ID NO: 11409 - DNA, 20 bp, Homo sapiens
ggcagaattacttgaacccc

SEQ ID NO: 11410 - DNA, 20 bp, Homo sapiens
gcagaattacttgaacccct

SEQ ID NO: 11411 - DNA, 20 bp, Homo sapiens
cagaattacttgaacccctg

SEQ ID NO: 11412 - DNA, 20 bp, Homo sapiens
agaattacttgaacccctgg

SEQ ID NO: 11413 - DNA, 20 bp, Homo sapiens
gaattacttgaacccctggg

SEQ ID NO: 11414 - DNA, 20 bp, Homo sapiens
tcactgcaacctccccccag

SEQ ID NO: 11415 - DNA, 20 bp, Homo sapiens
ctcactgcaacctcccccca

SEQ ID NO: 11416 - DNA, 20 bp, Homo sapiens
ttacttgaacccctgggggg

SEQ ID NO: 11417 - DNA, 20 bp, Homo sapiens
gctcactgcaacctcccccc

SEQ ID NO: 11418 - DNA, 20 bp, Homo sapiens
ttgcccaggctggagtgtag

SEQ ID NO: 11419 - DNA, 20 bp, Homo sapiens
cttgccactacactccagcc

SEQ ID NO: 11420 - DNA, 20 bp, Homo sapiens
ttgccactacactccagcct

SEQ ID NO: 11421 - DNA, 20 bp, Homo sapiens
cctcactctgttgcccaggc

SEQ ID NO: 11422 - DNA, 20 bp, Homo sapiens
gtctcctcactctgttgccc

SEQ ID NO: 11423 - DNA, 20 bp, Homo sapiens
ccagcctgggcaacagagtg

SEQ ID NO: 11424 - DNA, 20 bp, Homo sapiens
aagaaaaaaaaaagtaaact

SEQ ID NO: 11425 - DNA, 20 bp, Homo sapiens
ggctaggggagtctgttggc

SEQ ID NO: 11426 - DNA, 20 bp, Homo sapiens
ccgaggctaggggagtctgt

SEQ ID NO: 11427 - DNA, 20 bp, Homo sapiens
ctggccctcaccgaggctag

SEQ ID NO: 11428 - DNA, 20 bp, Homo sapiens
ccaacagactcccctagcct

SEQ ID NO: 11429 - DNA, 20 bp, Homo sapiens
actggccctcaccgaggcta

SEQ ID NO: 11430 - DNA, 20 bp, Homo sapiens
cactggccctcaccgaggct

SEQ ID NO: 11431 - DNA, 20 bp, Homo sapiens
agactcccctagcctcggtg

SEQ ID NO: 11432 - DNA, 20 bp, Homo sapiens
gactcccctagcctcggtga

SEQ ID NO: 11433 - DNA, 20 bp, Homo sapiens
cagaacactggccctcaccg

SEQ ID NO: 11434 - DNA, 20 bp, Homo sapiens
ctcggtgagggccagtgttc

SEQ ID NO: 11435 - DNA, 20 bp, Homo sapiens
agatctgcctcccagaacac

SEQ ID NO: 11436 - DNA, 20 bp, Homo sapiens
tcggtgagggccagtgttct

SEQ ID NO: 11437 - DNA, 20 bp, Homo sapiens
gtgagggccagtgttctggg

SEQ ID NO: 11438 - DNA, 20 bp, Homo sapiens
agcctgccagtgggtgaact

SEQ ID NO: 11439 - DNA, 20 bp, Homo sapiens
tctagtcctagttcacccac

SEQ ID NO: 11440 - DNA, 20 bp, Homo sapiens
gtcctagttcacccactggc

SEQ ID NO: 11441 - DNA, 20 bp, Homo sapiens
aagggcaccagcctgccagt

SEQ ID NO: 11442 - DNA, 20 bp, Homo sapiens
caagggcaccagcctgccag

SEQ ID NO: 11443 - DNA, 20 bp, Homo sapiens
tagttcacccactggcaggc

SEQ ID NO: 11444 - DNA, 20 bp, Homo sapiens
cactggcaggctggtgccct

SEQ ID NO: 11445 - DNA, 20 bp, Homo sapiens
actggcaggctggtgccctt

SEQ ID NO: 11446 - DNA, 20 bp, Homo sapiens
gcaggctggtgcccttgggc

SEQ ID NO: 11447 - DNA, 20 bp, Homo sapiens
cagagaagcgacctgcccaa

SEQ ID NO: 11448 - DNA, 20 bp, Homo sapiens
ccagagaagcgacctgccca

SEQ ID NO: 11449 - DNA, 20 bp, Homo sapiens
ccttgggcaggtcgcttctc

SEQ ID NO: 11450 - DNA, 20 bp, Homo sapiens
cttgggcaggtcgcttctct

SEQ ID NO: 11451 - DNA, 20 bp, Homo sapiens
ttgggcaggtcgcttctctg

SEQ ID NO: 11452 - DNA, 20 bp, Homo sapiens
gatttgatctcattttatag

SEQ ID NO: 11453 - DNA, 20 bp, Homo sapiens
agcacaaactcttagaacat

SEQ ID NO: 11454 - DNA, 20 bp, Homo sapiens
gagcacaaactcttagaaca

SEQ ID NO: 11455 - DNA, 20 bp, Homo sapiens
tgttctaagagtttgtgctc

SEQ ID NO: 11456 - DNA, 20 bp, Homo sapiens
gctctggagtcagacagatc

SEQ ID NO: 11457 - DNA, 20 bp, Homo sapiens
ctctggagtcagacagatct

SEQ ID NO: 11458 - DNA, 20 bp, Homo sapiens
caagatcacagagctggcag

SEQ ID NO: 11459 - DNA, 20 bp, Homo sapiens
aagctacaagatcacagagc

SEQ ID NO: 11460 - DNA, 20 bp, Homo sapiens
ttcagtctcgtcatctgaca

SEQ ID NO: 11461 - DNA, 20 bp, Homo sapiens
aactgtctcactgtgttgtt

SEQ ID NO: 11462 - DNA, 20 bp, Homo sapiens
actgtctcactgtgttgtta

SEQ ID NO: 11463 - DNA, 20 bp, Homo sapiens
actgtgttgttagggtttaa

SEQ ID NO: 11464 - DNA, 20 bp, Homo sapiens
aactctgaaaccggaaatca

SEQ ID NO: 11465 - DNA, 20 bp, Homo sapiens
gtgttagctaccctgatttc

SEQ ID NO: 11466 - DNA, 20 bp, Homo sapiens
gaactctgaaaccggaaatc

SEQ ID NO: 11467 - DNA, 20 bp, Homo sapiens
ggaccacagaactctgaaac

SEQ ID NO: 11468 - DNA, 20 bp, Homo sapiens
tttccggtttcagagttctg

SEQ ID NO: 11469 - DNA, 20 bp, Homo sapiens
cactgcatgtggcataaact

SEQ ID NO: 11470 - DNA, 20 bp, Homo sapiens
tcactgcatgtggcataaac

SEQ ID NO: 11471 - DNA, 20 bp, Homo sapiens
ccatacaacgtcactgcatg

SEQ ID NO: 11472 - DNA, 20 bp, Homo sapiens
ccacatgcagtgacgttgta

SEQ ID NO: 11473 - DNA, 20 bp, Homo sapiens
atgcagtgacgttgtatggt

SEQ ID NO: 11474 - DNA, 20 bp, Homo sapiens
tgacgttgtatggtaggctg

SEQ ID NO: 11475 - DNA, 20 bp, Homo sapiens
ttgtatggtaggctgtggtg

SEQ ID NO: 11476 - DNA, 20 bp, Homo sapiens
gcatgcgctgagttctgaag

SEQ ID NO: 11477 - DNA, 20 bp, Homo sapiens
tgcacagcttgcagaagaga

SEQ ID NO: 11478 - DNA, 20 bp, Homo sapiens
cttgcagaagagaaggccag

SEQ ID NO: 11479 - DNA, 20 bp, Homo sapiens
gagccttcttaggtctcctc

SEQ ID NO: 11480 - DNA, 20 bp, Homo sapiens
aggccagaggagacctaaga

SEQ ID NO: 11481 - DNA, 20 bp, Homo sapiens
agtgttcgaagagccttctt

SEQ ID NO: 11482 - DNA, 20 bp, Homo sapiens
tcttcgaacacttgaaagac

SEQ ID NO: 11483 - DNA, 20 bp, Homo sapiens
cacttgaaagaccggcatgt

SEQ ID NO: 11484 - DNA, 20 bp, Homo sapiens
actgcgcccggcctacatgc

SEQ ID NO: 11485 - DNA, 20 bp, Homo sapiens
tgaaagaccggcatgtaggc

SEQ ID NO: 11486 - DNA, 20 bp, Homo sapiens
gaaagaccggcatgtaggcc

SEQ ID NO: 11487 - DNA, 20 bp, Homo sapiens
caggcgtgagtcactgcgcc

SEQ ID NO: 11488 - DNA, 20 bp, Homo sapiens
tccaaaactgctgggattac

SEQ ID NO: 11489 - DNA, 20 bp, Homo sapiens
cctcgacctccaaaactgct

SEQ ID NO: 11490 - DNA, 20 bp, Homo sapiens
gcctcgacctccaaaactgc

SEQ ID NO: 11491 - DNA, 20 bp, Homo sapiens
gcctgtaatcccagcagttt

SEQ ID NO: 11492 - DNA, 20 bp, Homo sapiens
tgtaatcccagcagttttgg

SEQ ID NO: 11493 - DNA, 20 bp, Homo sapiens
cccagcagttttggaggtcg

SEQ ID NO: 11494 - DNA, 20 bp, Homo sapiens
agcagttttggaggtcgagg

SEQ ID NO: 11495 - DNA, 20 bp, Homo sapiens
gcagttttggaggtcgaggc

SEQ ID NO: 11496 - DNA, 20 bp, Homo sapiens
gttttggaggtcgaggcggg

SEQ ID NO: 11497 - DNA, 20 bp, Homo sapiens
gcgggtggatcacctgagtt

SEQ ID NO: 11498 - DNA, 20 bp, Homo sapiens
cgggtggatcacctgagttt

SEQ ID NO: 11499 - DNA, 20 bp, Homo sapiens
ggtatcaaactcccaaactc

SEQ ID NO: 11500 - DNA, 20 bp, Homo sapiens
tttcaccttgttggtcaggc

SEQ ID NO: 11501 - DNA, 20 bp, Homo sapiens
ggggtttcaccttgttggtc

SEQ ID NO: 11502 - DNA, 20 bp, Homo sapiens
tgataccagcctgaccaaca

SEQ ID NO: 11503 - DNA, 20 bp, Homo sapiens
gagacggggtttcaccttgt

SEQ ID NO: 11504 - DNA, 20 bp, Homo sapiens
tgtattttttagtagagacg

SEQ ID NO: 11505 - DNA, 20 bp, Homo sapiens
ttgtattttttagtagagac

SEQ ID NO: 11506 - DNA, 20 bp, Homo sapiens
tttgtattttttagtagaga

SEQ ID NO: 11507 - DNA, 20 bp, Homo sapiens
taaaaaatacaaacattagc

SEQ ID NO: 11508 - DNA, 20 bp, Homo sapiens
aaaaaatacaaacattagct

SEQ ID NO: 11509 - DNA, 20 bp, Homo sapiens
atacaaacattagctgggca

SEQ ID NO: 11510 - DNA, 20 bp, Homo sapiens
caaacattagctgggcatgg

SEQ ID NO: 11511 - DNA, 20 bp, Homo sapiens
acattagctgggcatggtgg

SEQ ID NO: 11512 - DNA, 20 bp, Homo sapiens
cattagctgggcatggtggc

SEQ ID NO: 11513 - DNA, 20 bp, Homo sapiens
accggagtagctgggattac

SEQ ID NO: 11514 - DNA, 20 bp, Homo sapiens
cctcaaccaccggagtagct

SEQ ID NO: 11515 - DNA, 20 bp, Homo sapiens
gcctcaaccaccggagtagc

SEQ ID NO: 11516 - DNA, 20 bp, Homo sapiens
gcctgtaatcccagctactc

SEQ ID NO: 11517 - DNA, 20 bp, Homo sapiens
tgtaatcccagctactccgg

SEQ ID NO: 11518 - DNA, 20 bp, Homo sapiens
agcaattctgcctcaaccac

SEQ ID NO: 11519 - DNA, 20 bp, Homo sapiens
cccagctactccggtggttg

SEQ ID NO: 11520 - DNA, 20 bp, Homo sapiens
gaggcagaattgcttgaacc

SEQ ID NO: 11521 - DNA, 20 bp, Homo sapiens
aggcagaattgcttgaaccc

SEQ ID NO: 11522 - DNA, 20 bp, Homo sapiens
cagaattgcttgaacccggg

SEQ ID NO: 11523 - DNA, 20 bp, Homo sapiens
cactgcaacctctgcctccc

SEQ ID NO: 11524 - DNA, 20 bp, Homo sapiens
tcactgcaacctctgcctcc

SEQ ID NO: 11525 - DNA, 20 bp, Homo sapiens
tgcttgaacccgggaggcag

SEQ ID NO: 11526 - DNA, 20 bp, Homo sapiens
gtttcgctcttgtctcaggc

SEQ ID NO: 11527 - DNA, 20 bp, Homo sapiens
tggagtttcgctcttgtctc

SEQ ID NO: 11528 - DNA, 20 bp, Homo sapiens
gttgtttgttttgtttgaga

SEQ ID NO: 11529 - DNA, 20 bp, Homo sapiens
tttttttggttttgtttggt

SEQ ID NO: 11530 - DNA, 20 bp, Homo sapiens
gttttttttttggttttgtt

SEQ ID NO: 11531 - DNA, 20 bp, Homo sapiens
ctacatgccagttttttttt

SEQ ID NO: 11532 - DNA, 20 bp, Homo sapiens
aacaaaaccaaaaaaaaaac

SEQ ID NO: 11533 - DNA, 20 bp, Homo sapiens
ctgggcctagttaaattctt

SEQ ID NO: 11534 - DNA, 20 bp, Homo sapiens
cttctccaaagaatttaact

SEQ ID NO: 11535 - DNA, 20 bp, Homo sapiens
caaagaatttaactaggccc

SEQ ID NO: 11536 - DNA, 20 bp, Homo sapiens
aaagaatttaactaggccca

SEQ ID NO: 11537 - DNA, 20 bp, Homo sapiens
aagaatttaactaggcccag

SEQ ID NO: 11538 - DNA, 20 bp, Homo sapiens
aatttaactaggcccagggg

SEQ ID NO: 11539 - DNA, 20 bp, Homo sapiens
atttatactgcacctcccct

SEQ ID NO: 11540 - DNA, 20 bp, Homo sapiens
aatttatactgcacctcccc

SEQ ID NO: 11541 - DNA, 20 bp, Homo sapiens
aatctcaactgtctgccaaa

SEQ ID NO: 11542 - DNA, 20 bp, Homo sapiens
atgaagtagctcattccatt

SEQ ID NO: 11543 - DNA, 20 bp, Homo sapiens
atggaatgagctacttcata

SEQ ID NO: 11544 - DNA, 20 bp, Homo sapiens
ttgaatgcctccaaagacag

SEQ ID NO: 11545 - DNA, 20 bp, Homo sapiens
agtagtgagtcctctgtctt

SEQ ID NO: 11546 - DNA, 20 bp, Homo sapiens
agtgagtcctctgtctttgg

SEQ ID NO: 11547 - DNA, 20 bp, Homo sapiens
gcattcaaataaaagccaga

SEQ ID NO: 11548 - DNA, 20 bp, Homo sapiens
attgttgataaatggccatc

SEQ ID NO: 11549 - DNA, 20 bp, Homo sapiens
ttacatggattgttgataaa

SEQ ID NO: 11550 - DNA, 20 bp, Homo sapiens
atttcatctaacgttttaca

SEQ ID NO: 11551 - DNA, 20 bp, Homo sapiens
ggaagagatcttggatatat

SEQ ID NO: 11552 - DNA, 20 bp, Homo sapiens
atctgaattggaagagatct

SEQ ID NO: 11553 - DNA, 20 bp, Homo sapiens
ttctttcataaaatctgaat

SEQ ID NO: 11554 - DNA, 20 bp, Homo sapiens
attttatgaaagaatttcta

SEQ ID NO: 11555 - DNA, 20 bp, Homo sapiens
gtctttgtaatgagacattt

SEQ ID NO: 11556 - DNA, 20 bp, Homo sapiens
atgaacccacatactgattt

SEQ ID NO: 11557 - DNA, 20 bp, Homo sapiens
atcaagccaaaatcagtatg

SEQ ID NO: 11558 - DNA, 20 bp, Homo sapiens
tcaagccaaaatcagtatgt

SEQ ID NO: 11559 - DNA, 20 bp, Homo sapiens
gcttttacagtttcctcatt

SEQ ID NO: 11560 - DNA, 20 bp, Homo sapiens
taaaatccaacagccaaatg

SEQ ID NO: 11561 - DNA, 20 bp, Homo sapiens
cagtttcctcatttggctgt

SEQ ID NO: 11562 - DNA, 20 bp, Homo sapiens
tgaacaggccttgtttttct

SEQ ID NO: 11563 - DNA, 20 bp, Homo sapiens
aaaagcatccaagaaaaaca

SEQ ID NO: 11564 - DNA, 20 bp, Homo sapiens
aagttgtcttgtttttgaac

SEQ ID NO: 11565 - DNA, 20 bp, Homo sapiens
caaatgcaggcaacagtgag

SEQ ID NO: 11566 - DNA, 20 bp, Homo sapiens
cgtttctcacgtacaaatgc

SEQ ID NO: 11567 - DNA, 20 bp, Homo sapiens
tccagtgcctgcgcgaacat

SEQ ID NO: 11568 - DNA, 20 bp, Homo sapiens
aaagtctccaatgttcgcgc

SEQ ID NO: 11569 - DNA, 20 bp, Homo sapiens
tccaatgttcgcgcaggcac

SEQ ID NO: 11570 - DNA, 20 bp, Homo sapiens
ggcactggagtcagagaaaa

SEQ ID NO: 11571 - DNA, 20 bp, Homo sapiens
cctcaaagagtggcagagaa

SEQ ID NO: 11572 - DNA, 20 bp, Homo sapiens
gtgagattctcctcaaagag

SEQ ID NO: 11573 - DNA, 20 bp, Homo sapiens
cctttctctgccactctttg

SEQ ID NO: 11574 - DNA, 20 bp, Homo sapiens
attctacagtgcataataaa

SEQ ID NO: 11575 - DNA, 20 bp, Homo sapiens
agatgttgttatgtggtaca

SEQ ID NO: 11576 - DNA, 20 bp, Homo sapiens
tttaccaagatgttgttatg

SEQ ID NO: 11577 - DNA, 20 bp, Homo sapiens
tgtaccacataacaacatct

SEQ ID NO: 11578 - DNA, 20 bp, Homo sapiens
acaacagactgcatatatga

SEQ ID NO: 11579 - DNA, 20 bp, Homo sapiens
acagactgcatatatgatgg

SEQ ID NO: 11580 - DNA, 20 bp, Homo sapiens
ataaattaaccttagcttac

SEQ ID NO: 11581 - DNA, 20 bp, Homo sapiens
ggtggtcatccagtaagcta

SEQ ID NO: 11582 - DNA, 20 bp, Homo sapiens
gtagtcttactctgtcaccc

SEQ ID NO: 11583 - DNA, 20 bp, Homo sapiens
gtgccattgcactctagcct

SEQ ID NO: 11584 - DNA, 20 bp, Homo sapiens
ggtgccattgcactctagcc

SEQ ID NO: 11585 - DNA, 20 bp, Homo sapiens
tcacccaggctagagtgcaa

SEQ ID NO: 11586 - DNA, 20 bp, Homo sapiens
agagtgcaatggcaccatct

SEQ ID NO: 11587 - DNA, 20 bp, Homo sapiens
gaggttgcagtgagccaaga

SEQ ID NO: 11588 - DNA, 20 bp, Homo sapiens
tgcttgaacccaggaggtag

SEQ ID NO: 11589 - DNA, 20 bp, Homo sapiens
tcactgcaacctctacctcc

SEQ ID NO: 11590 - DNA, 20 bp, Homo sapiens
cactgcaacctctacctcct

SEQ ID NO: 11591 - DNA, 20 bp, Homo sapiens
gagatttgcttgaacccagg

SEQ ID NO: 11592 - DNA, 20 bp, Homo sapiens
caggagatttgcttgaaccc

SEQ ID NO: 11593 - DNA, 20 bp, Homo sapiens
gctactttggaggctgaggc

SEQ ID NO: 11594 - DNA, 20 bp, Homo sapiens
cccagctactttggaggctg

SEQ ID NO: 11595 - DNA, 20 bp, Homo sapiens
tgtaatcccagctactttgg

SEQ ID NO: 11596 - DNA, 20 bp, Homo sapiens
gcctgtaatcccagctactt

SEQ ID NO: 11597 - DNA, 20 bp, Homo sapiens
gcctcagcctccaaagtagc

SEQ ID NO: 11598 - DNA, 20 bp, Homo sapiens
cctcagcctccaaagtagct

SEQ ID NO: 11599 - DNA, 20 bp, Homo sapiens
tccaaagtagctgggattac

SEQ ID NO: 11600 - DNA, 20 bp, Homo sapiens
aaaaattagccagatgtggt

SEQ ID NO: 11601 - DNA, 20 bp, Homo sapiens
aaaaaattagccagatgtgg

SEQ ID NO: 11602 - DNA, 20 bp, Homo sapiens
ttacaggcacccaccacatc

SEQ ID NO: 11603 - DNA, 20 bp, Homo sapiens
tacaaaaaattagccagatg

SEQ ID NO: 11604 - DNA, 20 bp, Homo sapiens
ttttgtatttttagtaaaga

SEQ ID NO: 11605 - DNA, 20 bp, Homo sapiens
tttgtatttttagtaaagat

SEQ ID NO: 11606 - DNA, 20 bp, Homo sapiens
ttgtatttttagtaaagatg

SEQ ID NO: 11607 - DNA, 20 bp, Homo sapiens
aagatggggtttcaccatgt

SEQ ID NO: 11608 - DNA, 20 bp, Homo sapiens
tgagatcagcctggccaaca

SEQ ID NO: 11609 - DNA, 20 bp, Homo sapiens
ggggtttcaccatgttggcc

SEQ ID NO: 11610 - DNA, 20 bp, Homo sapiens
tcaggagtttgagatcagcc

SEQ ID NO: 11611 - DNA, 20 bp, Homo sapiens
cgggcagatcacttgaggtc

SEQ ID NO: 11612 - DNA, 20 bp, Homo sapiens
cgaggcgggcagatcacttg

SEQ ID NO: 11613 - DNA, 20 bp, Homo sapiens
ctcaagtgatctgcccgcct

SEQ ID NO: 11614 - DNA, 20 bp, Homo sapiens
gcactttgggaggccgaggc

SEQ ID NO: 11615 - DNA, 20 bp, Homo sapiens
agcactttgggaggccgagg

SEQ ID NO: 11616 - DNA, 20 bp, Homo sapiens
tccagcactttgggaggccg

SEQ ID NO: 11617 - DNA, 20 bp, Homo sapiens
tgtggttccagcactttggg

SEQ ID NO: 11618 - DNA, 20 bp, Homo sapiens
gcctgtggttccagcacttt

SEQ ID NO: 11619 - DNA, 20 bp, Homo sapiens
gcctcggcctcccaaagtgc

SEQ ID NO: 11620 - DNA, 20 bp, Homo sapiens
ggcctgtggttccagcactt

SEQ ID NO: 11621 - DNA, 20 bp, Homo sapiens
tcccaaagtgctggaaccac

SEQ ID NO: 11622 - DNA, 20 bp, Homo sapiens
ggcacagtggctcaggcctg

SEQ ID NO: 11623 - DNA, 20 bp, Homo sapiens
aaggctgggcacagtggctc

SEQ ID NO: 11624 - DNA, 20 bp, Homo sapiens
gcaaacaaggctgggcacag

SEQ ID NO: 11625 - DNA, 20 bp, Homo sapiens
ttaaaaaagcaaacaaggct

SEQ ID NO: 11626 - DNA, 20 bp, Homo sapiens
gttaaaaaagcaaacaaggc

SEQ ID NO: 11627 - DNA, 20 bp, Homo sapiens
atctgttaaaaaagcaaaca

SEQ ID NO: 11628 - DNA, 20 bp, Homo sapiens
taaaaatctgaagactctag

SEQ ID NO: 11629 - DNA, 20 bp, Homo sapiens
tatactttttttttttgaaa

SEQ ID NO: 11630 - DNA, 20 bp, Homo sapiens
cggagtctcactctgtcacc

SEQ ID NO: 11631 - DNA, 20 bp, Homo sapiens
gtctcactctgtcaccaggc

SEQ ID NO: 11632 - DNA, 20 bp, Homo sapiens
tgcggcactgcactccagcc

SEQ ID NO: 11633 - DNA, 20 bp, Homo sapiens
ggagtgcagtgccgcaatct

SEQ ID NO: 11634 - DNA, 20 bp, Homo sapiens
gttgcagtgagccgagattg

SEQ ID NO: 11635 - DNA, 20 bp, Homo sapiens
tgcttgaacctgggaggcgg

SEQ ID NO: 11636 - DNA, 20 bp, Homo sapiens
cactgcaacctccgcctccc

SEQ ID NO: 11637 - DNA, 20 bp, Homo sapiens
aattgcttgaacctgggagg

SEQ ID NO: 11638 - DNA, 20 bp, Homo sapiens
gagaattgcttgaacctggg

SEQ ID NO: 11639 - DNA, 20 bp, Homo sapiens
caggagaattgcttgaacct

SEQ ID NO: 11640 - DNA, 20 bp, Homo sapiens
gcaggagaattgcttgaacc

SEQ ID NO: 11641 - DNA, 20 bp, Homo sapiens
gctactcgggaggctgaggc

SEQ ID NO: 11642 - DNA, 20 bp, Homo sapiens
tccagctactcgggaggctg

SEQ ID NO: 11643 - DNA, 20 bp, Homo sapiens
tgtaattccagctactcggg

SEQ ID NO: 11644 - DNA, 20 bp, Homo sapiens
acttgtaattccagctactc

SEQ ID NO: 11645 - DNA, 20 bp, Homo sapiens
gcctcagcctcccgagtagc

SEQ ID NO: 11646 - DNA, 20 bp, Homo sapiens
cacttgtaattccagctact

SEQ ID NO: 11647 - DNA, 20 bp, Homo sapiens
atgcaaaaattagctgggtg

SEQ ID NO: 11648 - DNA, 20 bp, Homo sapiens
taaaaatgcaaaaattagct

SEQ ID NO: 11649 - DNA, 20 bp, Homo sapiens
gtaaaaatgcaaaaattagc

SEQ ID NO: 11650 - DNA, 20 bp, Homo sapiens
tttttgcatttttacttgac

SEQ ID NO: 11651 - DNA, 20 bp, Homo sapiens
ttttgcatttttacttgaca

SEQ ID NO: 11652 - DNA, 20 bp, Homo sapiens
ttgacagggtttcaccatgt

SEQ ID NO: 11653 - DNA, 20 bp, Homo sapiens
tgaaactatcctagccaaca

SEQ ID NO: 11654 - DNA, 20 bp, Homo sapiens
agggtttcaccatgttggct

SEQ ID NO: 11655 - DNA, 20 bp, Homo sapiens
ttggctaggatagtttcacc

SEQ ID NO: 11656 - DNA, 20 bp, Homo sapiens
atcatgaggccaagagatcc

SEQ ID NO: 11657 - DNA, 20 bp, Homo sapiens
atagtttcaccaggatctct

SEQ ID NO: 11658 - DNA, 20 bp, Homo sapiens
gccgaggcaggctgatcatg

SEQ ID NO: 11659 - DNA, 20 bp, Homo sapiens
gcctcatgatcagcctgcct

SEQ ID NO: 11660 - DNA, 20 bp, Homo sapiens
gcactttgggaggccgaggc

SEQ ID NO: 11661 - DNA, 20 bp, Homo sapiens
cccagcactttgggaggccg

SEQ ID NO: 11662 - DNA, 20 bp, Homo sapiens
tgtaatcccagcactttggg

SEQ ID NO: 11663 - DNA, 20 bp, Homo sapiens
acctgtaatcccagcacttt

SEQ ID NO: 11664 - DNA, 20 bp, Homo sapiens
gcctcggcctcccaaagtgc

SEQ ID NO: 11665 - DNA, 20 bp, Homo sapiens
cacctgtaatcccagcactt

SEQ ID NO: 11666 - DNA, 20 bp, Homo sapiens
cctcggcctcccaaagtgct

SEQ ID NO: 11667 - DNA, 20 bp, Homo sapiens
tcccaaagtgctgggattac

SEQ ID NO: 11668 - DNA, 20 bp, Homo sapiens
gaagtataggctgggcacgg

SEQ ID NO: 11669 - DNA, 20 bp, Homo sapiens
agggaagtataggctgggca

SEQ ID NO: 11670 - DNA, 20 bp, Homo sapiens
caaaaagggaagtataggct

SEQ ID NO: 11671 - DNA, 20 bp, Homo sapiens
tcaaaaagggaagtataggc

SEQ ID NO: 11672 - DNA, 20 bp, Homo sapiens
gtattcaaaaagggaagtat

SEQ ID NO: 11673 - DNA, 20 bp, Homo sapiens
caccaaatggtattcaaaaa

SEQ ID NO: 11674 - DNA, 20 bp, Homo sapiens
acaccaaatggtattcaaaa

SEQ ID NO: 11675 - DNA, 20 bp, Homo sapiens
ttccctttttgaataccatt

SEQ ID NO: 11676 - DNA, 20 bp, Homo sapiens
taattcttcaaaacaccaaa

SEQ ID NO: 11677 - DNA, 20 bp, Homo sapiens
aattaacagctttgtgaacg

SEQ ID NO: 11678 - DNA, 20 bp, Homo sapiens
cgtggcagtgcttgtgattc

SEQ ID NO: 11679 - DNA, 20 bp, Homo sapiens
ggttctccccttggtctcaa

SEQ ID NO: 11680 - DNA, 20 bp, Homo sapiens
tcaggcttccattgagacca

SEQ ID NO: 11681 - DNA, 20 bp, Homo sapiens
caggcttccattgagaccaa

SEQ ID NO: 11682 - DNA, 20 bp, Homo sapiens
aggcttccattgagaccaag

SEQ ID NO: 11683 - DNA, 20 bp, Homo sapiens
ctgcaaccaggttctcccct

SEQ ID NO: 11684 - DNA, 20 bp, Homo sapiens
ttgagaccaaggggagaacc

SEQ ID NO: 11685 - DNA, 20 bp, Homo sapiens
caaggggagaacctggttgc

SEQ ID NO: 11686 - DNA, 20 bp, Homo sapiens
cgtctgtttgtcctgcaacc

SEQ ID NO: 11687 - DNA, 20 bp, Homo sapiens
ctggttgcaggacaaacaga

SEQ ID NO: 11688 - DNA, 20 bp, Homo sapiens
acaaacagacggacagcgtg

SEQ ID NO: 11689 - DNA, 20 bp, Homo sapiens
gtgtttaaatgctcttctga

SEQ ID NO: 11690 - DNA, 20 bp, Homo sapiens
gaaaacaataatataatctt

SEQ ID NO: 11691 - DNA, 20 bp, Homo sapiens
agaaaacaataatataatct

SEQ ID NO: 11692 - DNA, 20 bp, Homo sapiens
tgtgtcacactttgccaaac

SEQ ID NO: 11693 - DNA, 20 bp, Homo sapiens
ttcattttccacatcctgtt

SEQ ID NO: 11694 - DNA, 20 bp, Homo sapiens
acactttgccaaacaggatg

SEQ ID NO: 11695 - DNA, 20 bp, Homo sapiens
ggatgtggaaaatgaataag

SEQ ID NO: 11696 - DNA, 20 bp, Homo sapiens
aatgaataagcggttttctt

SEQ ID NO: 11697 - DNA, 20 bp, Homo sapiens
ggcacttcttaacagacaat

SEQ ID NO: 11698 - DNA, 20 bp, Homo sapiens
tttatgtgtttcttaagcaa

SEQ ID NO: 11699 - DNA, 20 bp, Homo sapiens
agctatgttcagtgactaaa

SEQ ID NO: 11700 - DNA, 20 bp, Homo sapiens
actgaacatagctatatgta

SEQ ID NO: 11701 - DNA, 20 bp, Homo sapiens
tatatgtatggttgttacta

SEQ ID NO: 11702 - DNA, 20 bp, Homo sapiens
atatgtatggttgttactat

SEQ ID NO: 11703 - DNA, 20 bp, Homo sapiens
ccagaattttcaaagaaaat

SEQ ID NO: 11704 - DNA, 20 bp, Homo sapiens
ccaattttctttgaaaattc

SEQ ID NO: 11705 - DNA, 20 bp, Homo sapiens
ttgaaaattctggcagacca

SEQ ID NO: 11706 - DNA, 20 bp, Homo sapiens
tatgtaaacaaaaagaacct

SEQ ID NO: 11707 - DNA, 20 bp, Homo sapiens
agcaaacgtcacatcgccct

SEQ ID NO: 11708 - DNA, 20 bp, Homo sapiens
cagggcgatgtgacgtttgc

SEQ ID NO: 11709 - DNA, 20 bp, Homo sapiens
gcgcacgtggacgccgacaa

SEQ ID NO: 11710 - DNA, 20 bp, Homo sapiens
tggacgccgacaaaggtgcg

SEQ ID NO: 11711 - DNA, 20 bp, Homo sapiens
tcggcgtccacgtgcgccgt

SEQ ID NO: 11712 - DNA, 20 bp, Homo sapiens
aagtggacagccgcacgccg

SEQ ID NO: 11713 - DNA, 20 bp, Homo sapiens
gtctaccccaatggccggtt

SEQ ID NO: 11714 - DNA, 20 bp, Homo sapiens
cgccgacaaaggtgcgcggg

SEQ ID NO: 11715 - DNA, 20 bp, Homo sapiens
gcacgaagcccccgttttcg

SEQ ID NO: 11716 - DNA, 20 bp, Homo sapiens
cagggtgatgcggaataccg

SEQ ID NO: 11717 - DNA, 20 bp, Homo sapiens
ggacgccgacaaaggtgcgc

SEQ ID NO: 11718 - DNA, 20 bp, Homo sapiens
gattaccaaaccggccattg

SEQ ID NO: 11719 - DNA, 20 bp, Homo sapiens
gcttcacgactggatgtcgg

SEQ ID NO: 11720 - DNA, 20 bp, Homo sapiens
gcgccgtggggactatctgc

SEQ ID NO: 11721 - DNA, 20 bp, Homo sapiens
gaccgcccgcgcacctttgt

SEQ ID NO: 11722 - DNA, 20 bp, Homo sapiens
tgatgcggaataccggggcc

SEQ ID NO: 11723 - DNA, 20 bp, Homo sapiens
ctgattaccaaaccggccat

SEQ ID NO: 11724 - DNA, 20 bp, Homo sapiens
tgcctgccgggtactgcgat

SEQ ID NO: 11725 - DNA, 20 bp, Homo sapiens
ttcccgaaggtggtcgtgca

SEQ ID NO: 11726 - DNA, 20 bp, Homo sapiens
gacgtttgctggcgatggac

SEQ ID NO: 11727 - DNA, 20 bp, Homo sapiens
acgatggctccggagccaca

SEQ ID NO: 11728 - DNA, 20 bp, Homo sapiens
ggcagagctgacgatggctc

SEQ ID NO: 11729 - DNA, 20 bp, Homo sapiens
aggccaggcagagctgacga

SEQ ID NO: 11730 - DNA, 20 bp, Homo sapiens
gagccatcgtcagctctgcc

SEQ ID NO: 11731 - DNA, 20 bp, Homo sapiens
cacagactagcaggaaggcc

SEQ ID NO: 11732 - DNA, 20 bp, Homo sapiens
gaggacacagactagcagga

SEQ ID NO: 11733 - DNA, 20 bp, Homo sapiens
cagagaggacacagactagc

SEQ ID NO: 11734 - DNA, 20 bp, Homo sapiens
ggaggaagaagattacagag

SEQ ID NO: 11735 - DNA, 20 bp, Homo sapiens
agctgtcttgatggatatgg

SEQ ID NO: 11736 - DNA, 20 bp, Homo sapiens
gaaagctgtcttgatggata

SEQ ID NO: 11737 - DNA, 20 bp, Homo sapiens
catgtggaaagctgtcttga

SEQ ID NO: 11738 - DNA, 20 bp, Homo sapiens
catcaagacagctttccaca

SEQ ID NO: 11739 - DNA, 20 bp, Homo sapiens
atcgacaggcctaggccatg

SEQ ID NO: 11740 - DNA, 20 bp, Homo sapiens
gacagctttccacatggcct

SEQ ID NO: 11741 - DNA, 20 bp, Homo sapiens
gacacaggatcgacaggcct

SEQ ID NO: 11742 - DNA, 20 bp, Homo sapiens
ggtctggacacaggatcgac

SEQ ID NO: 11743 - DNA, 20 bp, Homo sapiens
ccaggcggcggtctggacac

SEQ ID NO: 11744 - DNA, 20 bp, Homo sapiens
ggtgtcaccaggcggcggtc

SEQ ID NO: 11745 - DNA, 20 bp, Homo sapiens
cctgtgtccagaccgccgcc

SEQ ID NO: 11746 - DNA, 20 bp, Homo sapiens
ctgggggtgtcaccaggcgg

SEQ ID NO: 11747 - DNA, 20 bp, Homo sapiens
ccactgggggtgtcaccagg

SEQ ID NO: 11748 - DNA, 20 bp, Homo sapiens
tggccactgggggtgtcacc

SEQ ID NO: 11749 - DNA, 20 bp, Homo sapiens
ccgcctggtgacacccccag

SEQ ID NO: 11750 - DNA, 20 bp, Homo sapiens
aggcagaagatggccactgg

SEQ ID NO: 11751 - DNA, 20 bp, Homo sapiens
caggcagaagatggccactg

SEQ ID NO: 11752 - DNA, 20 bp, Homo sapiens
gcaggcagaagatggccact

SEQ ID NO: 11753 - DNA, 20 bp, Homo sapiens
ggcaggcagaagatggccac

SEQ ID NO: 11754 - DNA, 20 bp, Homo sapiens
agtacccggcaggcagaaga

SEQ ID NO: 11755 - DNA, 20 bp, Homo sapiens
agtggccatcttctgcctgc

SEQ ID NO: 11756 - DNA, 20 bp, Homo sapiens
gtggccatcttctgcctgcc

SEQ ID NO: 11757 - DNA, 20 bp, Homo sapiens
ggcccatcgcagtacccggc

SEQ ID NO: 11758 - DNA, 20 bp, Homo sapiens
ttggggcccatcgcagtacc

SEQ ID NO: 11759 - DNA, 20 bp, Homo sapiens
ctgcctgccgggtactgcga

SEQ ID NO: 11760 - DNA, 20 bp, Homo sapiens
tgcctgccgggtactgcgat

SEQ ID NO: 11761 - DNA, 20 bp, Homo sapiens
gacaggaagaggaggcgttg

SEQ ID NO: 11762 - DNA, 20 bp, Homo sapiens
ggacaggaagaggaggcgtt

SEQ ID NO: 11763 - DNA, 20 bp, Homo sapiens
gggacaggaagaggaggcgt

SEQ ID NO: 11764 - DNA, 20 bp, Homo sapiens
gtgctggggacaggaagagg

SEQ ID NO: 11765 - DNA, 20 bp, Homo sapiens
agggtgctggggacaggaag

SEQ ID NO: 11766 - DNA, 20 bp, Homo sapiens
ggaagcagggtgctggggac

SEQ ID NO: 11767 - DNA, 20 bp, Homo sapiens
gagagggaagcagggtgctg

SEQ ID NO: 11768 - DNA, 20 bp, Homo sapiens
ggagagggaagcagggtgct

SEQ ID NO: 11769 - DNA, 20 bp, Homo sapiens
cggagagggaagcagggtgc

SEQ ID NO: 11770 - DNA, 20 bp, Homo sapiens
aggtgccggagagggaagca

SEQ ID NO: 11771 - DNA, 20 bp, Homo sapiens
caggtgccggagagggaagc

SEQ ID NO: 11772 - DNA, 20 bp, Homo sapiens
cagcaccctgcttccctctc

SEQ ID NO: 11773 - DNA, 20 bp, Homo sapiens
gacagtccaggtgccggaga

SEQ ID NO: 11774 - DNA, 20 bp, Homo sapiens
agacagtccaggtgccggag

SEQ ID NO: 11775 - DNA, 20 bp, Homo sapiens
ctgcttccctctccggcacc

SEQ ID NO: 11776 - DNA, 20 bp, Homo sapiens
ggggtagacagtccaggtgc

SEQ ID NO: 11777 - DNA, 20 bp, Homo sapiens
gccattggggtagacagtcc

SEQ ID NO: 11778 - DNA, 20 bp, Homo sapiens
acctggactgtctaccccaa

SEQ ID NO: 11779 - DNA, 20 bp, Homo sapiens
gattaccaaaccggccattg

SEQ ID NO: 11780 - DNA, 20 bp, Homo sapiens
ggactgtctaccccaatggc

SEQ ID NO: 11781 - DNA, 20 bp, Homo sapiens
tgattaccaaaccggccatt

SEQ ID NO: 11782 - DNA, 20 bp, Homo sapiens
ctgattaccaaaccggccat

SEQ ID NO: 11783 - DNA, 20 bp, Homo sapiens
gtctaccccaatggccggtt

SEQ ID NO: 11784 - DNA, 20 bp, Homo sapiens
gtcccatctgattaccaaac

SEQ ID NO: 11785 - DNA, 20 bp, Homo sapiens
tggccggtttggtaatcaga

SEQ ID NO: 11786 - DNA, 20 bp, Homo sapiens
ggccggtttggtaatcagat

SEQ ID NO: 11787 - DNA, 20 bp, Homo sapiens
gggacagtatgccacgctgc

SEQ ID NO: 11788 - DNA, 20 bp, Homo sapiens
ctgggccagagccagcagcg

SEQ ID NO: 11789 - DNA, 20 bp, Homo sapiens
gtatgccacgctgctggctc

SEQ ID NO: 11790 - DNA, 20 bp, Homo sapiens
ggcccggcggccgttgagct

SEQ ID NO: 11791 - DNA, 20 bp, Homo sapiens
ctggctctggcccagctcaa

SEQ ID NO: 11792 - DNA, 20 bp, Homo sapiens
aggcccggcggccgttgagc

SEQ ID NO: 11793 - DNA, 20 bp, Homo sapiens
tggcccagctcaacggccgc

SEQ ID NO: 11794 - DNA, 20 bp, Homo sapiens
ggcccagctcaacggccgcc

SEQ ID NO: 11795 - DNA, 20 bp, Homo sapiens
caggcaggataaaggcccgg

SEQ ID NO: 11796 - DNA, 20 bp, Homo sapiens
tggcaggcaggataaaggcc

SEQ ID NO: 11797 - DNA, 20 bp, Homo sapiens
atgcatggcaggcaggataa

SEQ ID NO: 11798 - DNA, 20 bp, Homo sapiens
gggcggcatgcatggcaggc

SEQ ID NO: 11799 - DNA, 20 bp, Homo sapiens
gccagggcggcatgcatggc

SEQ ID NO: 11800 - DNA, 20 bp, Homo sapiens
cggggccagggcggcatgca

SEQ ID NO: 11801 - DNA, 20 bp, Homo sapiens
gcctgccatgcatgccgccc

SEQ ID NO: 11802 - DNA, 20 bp, Homo sapiens
gcggaataccggggccaggg

SEQ ID NO: 11803 - DNA, 20 bp, Homo sapiens
catgcatgccgccctggccc

SEQ ID NO: 11804 - DNA, 20 bp, Homo sapiens
gatgcggaataccggggcca

SEQ ID NO: 11805 - DNA, 20 bp, Homo sapiens
tgatgcggaataccggggcc

SEQ ID NO: 11806 - DNA, 20 bp, Homo sapiens
cagggtgatgcggaataccg

SEQ ID NO: 11807 - DNA, 20 bp, Homo sapiens
gcagggtgatgcggaatacc

SEQ ID NO: 11808 - DNA, 20 bp, Homo sapiens
ggcagggtgatgcggaatac

SEQ ID NO: 11809 - DNA, 20 bp, Homo sapiens
ccagcacgggcagggtgatg

SEQ ID NO: 11810 - DNA, 20 bp, Homo sapiens
ttctggggccagcacgggca

SEQ ID NO: 11811 - DNA, 20 bp, Homo sapiens
cttctggggccagcacgggc

SEQ ID NO: 11812 - DNA, 20 bp, Homo sapiens
ccgcatcaccctgcccgtgc

SEQ ID NO: 11813 - DNA, 20 bp, Homo sapiens
tccacttctggggccagcac

SEQ ID NO: 11814 - DNA, 20 bp, Homo sapiens
gtccacttctggggccagca

SEQ ID NO: 11815 - DNA, 20 bp, Homo sapiens
gcccgtgctggccccagaag

SEQ ID NO: 11816 - DNA, 20 bp, Homo sapiens
cgtgcggctgtccacttctg

SEQ ID NO: 11817 - DNA, 20 bp, Homo sapiens
gcgtgcggctgtccacttct

SEQ ID NO: 11818 - DNA, 20 bp, Homo sapiens
ggcgtgcggctgtccacttc

SEQ ID NO: 11819 - DNA, 20 bp, Homo sapiens
gcagctcccgccacggcgtg

SEQ ID NO: 11820 - DNA, 20 bp, Homo sapiens
aagtggacagccgcacgccg

SEQ ID NO: 11821 - DNA, 20 bp, Homo sapiens
tggacagccgcacgccgtgg

SEQ ID NO: 11822 - DNA, 20 bp, Homo sapiens
ggacagccgcacgccgtggc

SEQ ID NO: 11823 - DNA, 20 bp, Homo sapiens
tgaagctgcagctcccgcca

SEQ ID NO: 11824 - DNA, 20 bp, Homo sapiens
gggagctgcagcttcacgac

SEQ ID NO: 11825 - DNA, 20 bp, Homo sapiens
gcagcttcacgactggatgt

SEQ ID NO: 11826 - DNA, 20 bp, Homo sapiens
gcttcacgactggatgtcgg

SEQ ID NO: 11827 - DNA, 20 bp, Homo sapiens
ctggatgtcggaggagtacg

SEQ ID NO: 11828 - DNA, 20 bp, Homo sapiens
aagccagagagcttcaggaa

SEQ ID NO: 11829 - DNA, 20 bp, Homo sapiens
aggggaagccagagagcttc

SEQ ID NO: 11830 - DNA, 20 bp, Homo sapiens
gatcctttcctgaagctctc

SEQ ID NO: 11831 - DNA, 20 bp, Homo sapiens
ggaagaaagtccaagagcag

SEQ ID NO: 11832 - DNA, 20 bp, Homo sapiens
tctctggcttcccctgctct

SEQ ID NO: 11833 - DNA, 20 bp, Homo sapiens
tggaagaaagtccaagagca

SEQ ID NO: 11834 - DNA, 20 bp, Homo sapiens
gtggaagaaagtccaagagc

SEQ ID NO: 11835 - DNA, 20 bp, Homo sapiens
ggatctgttcccggagatgg

SEQ ID NO: 11836 - DNA, 20 bp, Homo sapiens
ggactttcttccaccatctc

SEQ ID NO: 11837 - DNA, 20 bp, Homo sapiens
gactttcttccaccatctcc

SEQ ID NO: 11838 - DNA, 20 bp, Homo sapiens
tgcggatctgttcccggaga

SEQ ID NO: 11839 - DNA, 20 bp, Homo sapiens
actctctgcggatctgttcc

SEQ ID NO: 11840 - DNA, 20 bp, Homo sapiens
cgtgcagggtgaactctctg

SEQ ID NO: 11841 - DNA, 20 bp, Homo sapiens
ttcccgaaggtggtcgtgca

SEQ ID NO: 11842 - DNA, 20 bp, Homo sapiens
cttcccgaaggtggtcgtgc

SEQ ID NO: 11843 - DNA, 20 bp, Homo sapiens
tcaccctgcacgaccacctt

SEQ ID NO: 11844 - DNA, 20 bp, Homo sapiens
caccctgcacgaccaccttc

SEQ ID NO: 11845 - DNA, 20 bp, Homo sapiens
tctgcgcctcttcccgaagg

SEQ ID NO: 11846 - DNA, 20 bp, Homo sapiens
cactctgcgcctcttcccga

SEQ ID NO: 11847 - DNA, 20 bp, Homo sapiens
gcacgaccaccttcgggaag

SEQ ID NO: 11848 - DNA, 20 bp, Homo sapiens
ggaagaggcgcagagtgtgc

SEQ ID NO: 11849 - DNA, 20 bp, Homo sapiens
gaagaggcgcagagtgtgct

SEQ ID NO: 11850 - DNA, 20 bp, Homo sapiens
tgtgctgggtcagctccgcc

SEQ ID NO: 11851 - DNA, 20 bp, Homo sapiens
gtgctgggtcagctccgcct

SEQ ID NO: 11852 - DNA, 20 bp, Homo sapiens
ggtcccctgtgcggcccagg

SEQ ID NO: 11853 - DNA, 20 bp, Homo sapiens
ggcggtcccctgtgcggccc

SEQ ID NO: 11854 - DNA, 20 bp, Homo sapiens
cagctccgcctgggccgcac

SEQ ID NO: 11855 - DNA, 20 bp, Homo sapiens
agctccgcctgggccgcaca

SEQ ID NO: 11856 - DNA, 20 bp, Homo sapiens
gctccgcctgggccgcacag

SEQ ID NO: 11857 - DNA, 20 bp, Homo sapiens
tgcgcgggcggtcccctgtg

SEQ ID NO: 11858 - DNA, 20 bp, Homo sapiens
cgccgacaaaggtgcgcggg

SEQ ID NO: 11859 - DNA, 20 bp, Homo sapiens
ggacgccgacaaaggtgcgc

SEQ ID NO: 11860 - DNA, 20 bp, Homo sapiens
tggacgccgacaaaggtgcg

SEQ ID NO: 11861 - DNA, 20 bp, Homo sapiens
gaccgcccgcgcacctttgt

SEQ ID NO: 11862 - DNA, 20 bp, Homo sapiens
gcgcacgtggacgccgacaa

SEQ ID NO: 11863 - DNA, 20 bp, Homo sapiens
gatagtccccacggcgcacg

SEQ ID NO: 11864 - DNA, 20 bp, Homo sapiens
gtcggcgtccacgtgcgccg

SEQ ID NO: 11865 - DNA, 20 bp, Homo sapiens
tcggcgtccacgtgcgccgt

SEQ ID NO: 11866 - DNA, 20 bp, Homo sapiens
cggcgtccacgtgcgccgtg

SEQ ID NO: 11867 - DNA, 20 bp, Homo sapiens
taacctgcagatagtcccca

SEQ ID NO: 11868 - DNA, 20 bp, Homo sapiens
gcgccgtggggactatctgc

SEQ ID NO: 11869 - DNA, 20 bp, Homo sapiens
tgcaggttatgcctcagcgc

SEQ ID NO: 11870 - DNA, 20 bp, Homo sapiens
accacacccttccagcgctg

SEQ ID NO: 11871 - DNA, 20 bp, Homo sapiens
ggttatgcctcagcgctgga

SEQ ID NO: 11872 - DNA, 20 bp, Homo sapiens
gttatgcctcagcgctggaa

SEQ ID NO: 11873 - DNA, 20 bp, Homo sapiens
gcctcagcgctggaagggtg

SEQ ID NO: 11874 - DNA, 20 bp, Homo sapiens
tcagcgctggaagggtgtgg

SEQ ID NO: 11875 - DNA, 20 bp, Homo sapiens
cagcgctggaagggtgtggt

SEQ ID NO: 11876 - DNA, 20 bp, Homo sapiens
tgggcgacagcgcctacctc

SEQ ID NO: 11877 - DNA, 20 bp, Homo sapiens
gtccatggcctgccggaggt

SEQ ID NO: 11878 - DNA, 20 bp, Homo sapiens
cgacagcgcctacctccggc

SEQ ID NO: 11879 - DNA, 20 bp, Homo sapiens
accagtccatggcctgccgg

SEQ ID NO: 11880 - DNA, 20 bp, Homo sapiens
ggaaccagtccatggcctgc

SEQ ID NO: 11881 - DNA, 20 bp, Homo sapiens
cgcctacctccggcaggcca

SEQ ID NO: 11882 - DNA, 20 bp, Homo sapiens
acctccggcaggccatggac

SEQ ID NO: 11883 - DNA, 20 bp, Homo sapiens
ccgtgcccggaaccagtcca

SEQ ID NO: 11884 - DNA, 20 bp, Homo sapiens
ggcaggccatggactggttc

SEQ ID NO: 11885 - DNA, 20 bp, Homo sapiens
gcaggccatggactggttcc

SEQ ID NO: 11886 - DNA, 20 bp, Homo sapiens
ccatggactggttccgggca

SEQ ID NO: 11887 - DNA, 20 bp, Homo sapiens
cgggggcttcgtgccgtgcc

SEQ ID NO: 11888 - DNA, 20 bp, Homo sapiens
gctggtgaccacgaaaacgg

SEQ ID NO: 11889 - DNA, 20 bp, Homo sapiens
tgctggtgaccacgaaaacg

SEQ ID NO: 11890 - DNA, 20 bp, Homo sapiens
ttgctggtgaccacgaaaac

SEQ ID NO: 11891 - DNA, 20 bp, Homo sapiens
gcacgaagcccccgttttcg

SEQ ID NO: 11892 - DNA, 20 bp, Homo sapiens
gttgctggtgaccacgaaaa

SEQ ID NO: 11893 - DNA, 20 bp, Homo sapiens
gttttcgtggtcaccagcaa

SEQ ID NO: 11894 - DNA, 20 bp, Homo sapiens
acaccactccatgccgttgc

SEQ ID NO: 11895 - DNA, 20 bp, Homo sapiens
cgtggtcaccagcaacggca

SEQ ID NO: 11896 - DNA, 20 bp, Homo sapiens
tcaccagcaacggcatggag

SEQ ID NO: 11897 - DNA, 20 bp, Homo sapiens
agaaaacatcgacacctccc

SEQ ID NO: 11898 - DNA, 20 bp, Homo sapiens
gaaaacatcgacacctccca

SEQ ID NO: 11899 - DNA, 20 bp, Homo sapiens
aaacgtcacatcgccctggg

SEQ ID NO: 11900 - DNA, 20 bp, Homo sapiens
agcaaacgtcacatcgccct

SEQ ID NO: 11901 - DNA, 20 bp, Homo sapiens
cagcaaacgtcacatcgccc

SEQ ID NO: 11902 - DNA, 20 bp, Homo sapiens
cagggcgatgtgacgtttgc

SEQ ID NO: 11903 - DNA, 20 bp, Homo sapiens
gatgtgacgtttgctggcga

SEQ ID NO: 11904 - DNA, 20 bp, Homo sapiens
gacgtttgctggcgatggac

SEQ ID NO: 11905 - DNA, 20 bp, Homo sapiens
gtttgctggcgatggacagg

SEQ ID NO: 11906 - DNA, 20 bp, Homo sapiens
atggacaggaggctacaccg

SEQ ID NO: 11907 - DNA, 20 bp, Homo sapiens
agcagggcaaagtctttcca

SEQ ID NO: 11908 - DNA, 20 bp, Homo sapiens
gtggttgcactgtgtgagca

SEQ ID NO: 11909 - DNA, 20 bp, Homo sapiens
tgtggttgcactgtgtgagc

SEQ ID NO: 11910 - DNA, 20 bp, Homo sapiens
tgccaatggtcataatggtg

SEQ ID NO: 11911 - DNA, 20 bp, Homo sapiens
gaaggtgccaatggtcataa

SEQ ID NO: 11912 - DNA, 20 bp, Homo sapiens
aaccacaccattatgaccat

SEQ ID NO: 11913 - DNA, 20 bp, Homo sapiens
ccagaagccgaaggtgccaa

SEQ ID NO: 11914 - DNA, 20 bp, Homo sapiens
attatgaccattggcacctt

SEQ ID NO: 11915 - DNA, 20 bp, Homo sapiens
gtaggcagcccagaagccga

SEQ ID NO: 11916 - DNA, 20 bp, Homo sapiens
ccattggcaccttcggcttc

SEQ ID NO: 11917 - DNA, 20 bp, Homo sapiens
cattggcaccttcggcttct

SEQ ID NO: 11918 - DNA, 20 bp, Homo sapiens
cggcttctgggctgcctacc

SEQ ID NO: 11919 - DNA, 20 bp, Homo sapiens
agtgtctccgccagccaggt

SEQ ID NO: 11920 - DNA, 20 bp, Homo sapiens
ttctgggctgcctacctggc

SEQ ID NO: 11921 - DNA, 20 bp, Homo sapiens
tgggctgcctacctggctgg

SEQ ID NO: 11922 - DNA, 20 bp, Homo sapiens
agacagtgtctccgccagcc

SEQ ID NO: 11923 - DNA, 20 bp, Homo sapiens
tggcggagacactgtctacc

SEQ ID NO: 11924 - DNA, 20 bp, Homo sapiens
ctggcagggtgaagttggcc

SEQ ID NO: 11925 - DNA, 20 bp, Homo sapiens
agagtctggcagggtgaagt

SEQ ID NO: 11926 - DNA, 20 bp, Homo sapiens
caggaactcagagtctggca

SEQ ID NO: 11927 - DNA, 20 bp, Homo sapiens
tcaggaactcagagtctggc

SEQ ID NO: 11928 - DNA, 20 bp, Homo sapiens
atcttcaggaactcagagtc

SEQ ID NO: 11929 - DNA, 20 bp, Homo sapiens
cctccggcttaaagatcttc

SEQ ID NO: 11930 - DNA, 20 bp, Homo sapiens
gttcctgaagatctttaagc

SEQ ID NO: 11931 - DNA, 20 bp, Homo sapiens
cctgaagatctttaagccgg

SEQ ID NO: 11932 - DNA, 20 bp, Homo sapiens
gaagatctttaagccggagg

SEQ ID NO: 11933 - DNA, 20 bp, Homo sapiens
tcgggcaggaaggccgcctc

SEQ ID NO: 11934 - DNA, 20 bp, Homo sapiens
gcccacccactcgggcagga

SEQ ID NO: 11935 - DNA, 20 bp, Homo sapiens
taatgcccacccactcgggc

SEQ ID NO: 11936 - DNA, 20 bp, Homo sapiens
aggcggccttcctgcccgag

SEQ ID NO: 11937 - DNA, 20 bp, Homo sapiens
ggcggccttcctgcccgagt

SEQ ID NO: 11938 - DNA, 20 bp, Homo sapiens
gcattaatgcccacccactc

SEQ ID NO: 11939 - DNA, 20 bp, Homo sapiens
ggccttcctgcccgagtggg

SEQ ID NO: 11940 - DNA, 20 bp, Homo sapiens
tgcattaatgcccacccact

SEQ ID NO: 11941 - DNA, 20 bp, Homo sapiens
gccttcctgcccgagtgggt

SEQ ID NO: 11942 - DNA, 20 bp, Homo sapiens
atgcagacttgtctccactc

SEQ ID NO: 11943 - DNA, 20 bp, Homo sapiens
ggcttagccaatgtccagag

SEQ ID NO: 11944 - DNA, 20 bp, Homo sapiens
cttgtctccactctggacat

SEQ ID NO: 11945 - DNA, 20 bp, Homo sapiens
gaaagtctccctggctctca

SEQ ID NO: 11946 - DNA, 20 bp, Homo sapiens
ttggctaagccttgagagcc

SEQ ID NO: 11947 - DNA, 20 bp, Homo sapiens
tggctaagccttgagagcca

SEQ ID NO: 11948 - DNA, 20 bp, Homo sapiens
gctacttcagaaagtctccc

SEQ ID NO: 11949 - DNA, 20 bp, Homo sapiens
ctgctggctctagaaagatc

SEQ ID NO: 11950 - DNA, 20 bp, Homo sapiens
cctctgaagccacgtactgc

SEQ ID NO: 11951 - DNA, 20 bp, Homo sapiens
tttctagagccagcagtacg

SEQ ID NO: 11952 - DNA, 20 bp, Homo sapiens
ccagcagtacgtggcttcag

SEQ ID NO: 11953 - DNA, 20 bp, Homo sapiens
agtacgtggcttcagaggcc

SEQ ID NO: 11954 - DNA, 20 bp, Homo sapiens
aagcttctccagaagatgcc

SEQ ID NO: 11955 - DNA, 20 bp, Homo sapiens
ttcagaggcctggcatcttc

SEQ ID NO: 11956 - DNA, 20 bp, Homo sapiens
gcatcttctggagaagcttg

SEQ ID NO: 11957 - DNA, 20 bp, Homo sapiens
tacgggcacccatttgcttc

SEQ ID NO: 11958 - DNA, 20 bp, Homo sapiens
tgtggtgttcctgaagcaaa

SEQ ID NO: 11959 - DNA, 20 bp, Homo sapiens
gtggtgttcctgaagcaaat

SEQ ID NO: 11960 - DNA, 20 bp, Homo sapiens
actagaatcactctggatac

SEQ ID NO: 11961 - DNA, 20 bp, Homo sapiens
aactagaatcactctggata

SEQ ID NO: 11962 - DNA, 20 bp, Homo sapiens
tctcccaactagaatcactc

SEQ ID NO: 11963 - DNA, 20 bp, Homo sapiens
gtatccagagtgattctagt

SEQ ID NO: 11964 - DNA, 20 bp, Homo sapiens
tatccagagtgattctagtt

SEQ ID NO: 11965 - DNA, 20 bp, Homo sapiens
gtgattctagttgggagagt

SEQ ID NO: 11966 - DNA, 20 bp, Homo sapiens
agttgggagagttggagaga

SEQ ID NO: 11967 - DNA, 20 bp, Homo sapiens
gttgggagagttggagagaa

SEQ ID NO: 11968 - DNA, 20 bp, Homo sapiens
ttgggagagttggagagaag

SEQ ID NO: 11969 - DNA, 20 bp, Homo sapiens
tgggagagttggagagaagg

SEQ ID NO: 11970 - DNA, 20 bp, Homo sapiens
ggagagaagggggacgtttc

SEQ ID NO: 11971 - DNA, 20 bp, Homo sapiens
agcaaaacatcttttcctga

SEQ ID NO: 11972 - DNA, 20 bp, Homo sapiens
aaacatcttttcctgatggc

SEQ ID NO: 11973 - DNA, 20 bp, Homo sapiens
agaactgcctgccagccatc

SEQ ID NO: 11974 - DNA, 20 bp, Homo sapiens
atcttttcctgatggctggc

SEQ ID NO: 11975 - DNA, 20 bp, Homo sapiens
ggaagagcaggtgggcactg

SEQ ID NO: 11976 - DNA, 20 bp, Homo sapiens
atgggctgggaagagcaggt

SEQ ID NO: 11977 - DNA, 20 bp, Homo sapiens
tatgggctgggaagagcagg

SEQ ID NO: 11978 - DNA, 20 bp, Homo sapiens
agatatgggctgggaagagc

SEQ ID NO: 11979 - DNA, 20 bp, Homo sapiens
aagtactgtagatatgggct

SEQ ID NO: 11980 - DNA, 20 bp, Homo sapiens
gaagtactgtagatatgggc

SEQ ID NO: 11981 - DNA, 20 bp, Homo sapiens
tctggaagtactgtagatat

SEQ ID NO: 11982 - DNA, 20 bp, Homo sapiens
atctggaagtactgtagata

SEQ ID NO: 11983 - DNA, 20 bp, Homo sapiens
atatctacagtacttccaga

SEQ ID NO: 11984 - DNA, 20 bp, Homo sapiens
cattcctgggggcagccatc

SEQ ID NO: 11985 - DNA, 20 bp, Homo sapiens
acttccagatggctgccccc

SEQ ID NO: 11986 - DNA, 20 bp, Homo sapiens
ggagagttccccattcctgg

SEQ ID NO: 11987 - DNA, 20 bp, Homo sapiens
cagatggctgcccccaggaa

SEQ ID NO: 11988 - DNA, 20 bp, Homo sapiens
gggagagttccccattcctg

SEQ ID NO: 11989 - DNA, 20 bp, Homo sapiens
agatggctgcccccaggaat

SEQ ID NO: 11990 - DNA, 20 bp, Homo sapiens
agggagagttccccattcct

SEQ ID NO: 11991 - DNA, 20 bp, Homo sapiens
gatggctgcccccaggaatg

SEQ ID NO: 11992 - DNA, 20 bp, Homo sapiens
gagggagagttccccattcc

SEQ ID NO: 11993 - DNA, 20 bp, Homo sapiens
ggaatggggaactctccctc

SEQ ID NO: 11994 - DNA, 20 bp, Homo sapiens
ctcttctagagtagaccaga

SEQ ID NO: 11995 - DNA, 20 bp, Homo sapiens
cctcttctagagtagaccag

SEQ ID NO: 11996 - DNA, 20 bp, Homo sapiens
cctctggtctactctagaag

SEQ ID NO: 11997 - DNA, 20 bp, Homo sapiens
ctctggtctactctagaaga

SEQ ID NO: 11998 - DNA, 20 bp, Homo sapiens
tctggtctactctagaagag

SEQ ID NO: 11999 - DNA, 20 bp, Homo sapiens
aagaggggttacttctcccc

SEQ ID NO: 12000 - DNA, 20 bp, Homo sapiens
agaggggttacttctcccct

SEQ ID NO: 12001 - DNA, 20 bp, Homo sapiens
tcagtctttggaggacccag

SEQ ID NO: 12002 - DNA, 20 bp, Homo sapiens
ttcagtctttggaggaccca

SEQ ID NO: 12003 - DNA, 20 bp, Homo sapiens
cttcagtctttggaggaccc

SEQ ID NO: 12004 - DNA, 20 bp, Homo sapiens
tatgctccttcagtctttgg

SEQ ID NO: 12005 - DNA, 20 bp, Homo sapiens
tcatatgctccttcagtctt

SEQ ID NO: 12006 - DNA, 20 bp, Homo sapiens
ctgggtcctccaaagactga

SEQ ID NO: 12007 - DNA, 20 bp, Homo sapiens
gacttggtgaatgcttgctc

SEQ ID NO: 12008 - DNA, 20 bp, Homo sapiens
cagaaacacagaaggggact

SEQ ID NO: 12009 - DNA, 20 bp, Homo sapiens
tcactccagaaacacagaag

SEQ ID NO: 12010 - DNA, 20 bp, Homo sapiens
atcactccagaaacacagaa

SEQ ID NO: 12011 - DNA, 20 bp, Homo sapiens
aatcactccagaaacacaga

SEQ ID NO: 12012 - DNA, 20 bp, Homo sapiens
caagtccccttctgtgtttc

SEQ ID NO: 12013 - DNA, 20 bp, Homo sapiens
tgtttctggagtgattctag

SEQ ID NO: 12014 - DNA, 20 bp, Homo sapiens
gtttctggagtgattctaga

SEQ ID NO: 12015 - DNA, 20 bp, Homo sapiens
gagggagacttgttctagag

SEQ ID NO: 12016 - DNA, 20 bp, Homo sapiens
gacttgttctagagaggacc

SEQ ID NO: 12017 - DNA, 20 bp, Homo sapiens
ttcttcacaggcatcaaacc

SEQ ID NO: 12018 - DNA, 20 bp, Homo sapiens
ggccctgcagggttcttcac

SEQ ID NO: 12019 - DNA, 20 bp, Homo sapiens
atgcctgtgaagaaccctgc

SEQ ID NO: 12020 - DNA, 20 bp, Homo sapiens
tgcctgtgaagaaccctgca

SEQ ID NO: 12021 - DNA, 20 bp, Homo sapiens
ctgtccataagggccctgca

SEQ ID NO: 12022 - DNA, 20 bp, Homo sapiens
cctgtccataagggccctgc

SEQ ID NO: 12023 - DNA, 20 bp, Homo sapiens
agaaccctgcagggccctta

SEQ ID NO: 12024 - DNA, 20 bp, Homo sapiens
gaaccccatcctgtccataa

SEQ ID NO: 12025 - DNA, 20 bp, Homo sapiens
agaaccccatcctgtccata

SEQ ID NO: 12026 - DNA, 20 bp, Homo sapiens
cctgcagggcccttatggac

SEQ ID NO: 12027 - DNA, 20 bp, Homo sapiens
cagggcccttatggacagga

SEQ ID NO: 12028 - DNA, 20 bp, Homo sapiens
agggcccttatggacaggat

SEQ ID NO: 12029 - DNA, 20 bp, Homo sapiens
gggcccttatggacaggatg

SEQ ID NO: 12030 - DNA, 20 bp, Homo sapiens
ttatggacaggatggggttc

SEQ ID NO: 12031 - DNA, 20 bp, Homo sapiens
gattcttcaccttagttatc

SEQ ID NO: 12032 - DNA, 20 bp, Homo sapiens
tctggaaatccagataacta

SEQ ID NO: 12033 - DNA, 20 bp, Homo sapiens
ttttttttttttttggagac

SEQ ID NO: 12034 - DNA, 20 bp, Homo sapiens
tttttttttttttggagaca

SEQ ID NO: 12035 - DNA, 20 bp, Homo sapiens
agggtctcgctctgttgccc

SEQ ID NO: 12036 - DNA, 20 bp, Homo sapiens
tctcgctctgttgcccaggc

SEQ ID NO: 12037 - DNA, 20 bp, Homo sapiens
acgccactgcactccagcct

SEQ ID NO: 12038 - DNA, 20 bp, Homo sapiens
cacgccactgcactccagcc

SEQ ID NO: 12039 - DNA, 20 bp, Homo sapiens
ttgcccaggctggagtgcag

SEQ ID NO: 12040 - DNA, 20 bp, Homo sapiens
ggagtgcagtggcgtgatct

SEQ ID NO: 12041 - DNA, 20 bp, Homo sapiens
aatcgcttgaacacaggagg

SEQ ID NO: 12042 - DNA, 20 bp, Homo sapiens
gagaatcgcttgaacacagg

SEQ ID NO: 12043 - DNA, 20 bp, Homo sapiens
caggagaatcgcttgaacac

SEQ ID NO: 12044 - DNA, 20 bp, Homo sapiens
tctactcaggaggctgagac

SEQ ID NO: 12045 - DNA, 20 bp, Homo sapiens
tgtagtcccatctactcagg

SEQ ID NO: 12046 - DNA, 20 bp, Homo sapiens
gcctgtagtcccatctactc

SEQ ID NO: 12047 - DNA, 20 bp, Homo sapiens
gtctcagcctcctgagtaga

SEQ ID NO: 12048 - DNA, 20 bp, Homo sapiens
tctcagcctcctgagtagat

SEQ ID NO: 12049 - DNA, 20 bp, Homo sapiens
tcctgagtagatgggactac

SEQ ID NO: 12050 - DNA, 20 bp, Homo sapiens
gtagatgggactacaggcac

SEQ ID NO: 12051 - DNA, 20 bp, Homo sapiens
caaaaattagccaggcataa

SEQ ID NO: 12052 - DNA, 20 bp, Homo sapiens
caggcacaggccattatgcc

SEQ ID NO: 12053 - DNA, 20 bp, Homo sapiens
taaaaatacaaaaattagcc

SEQ ID NO: 12054 - DNA, 20 bp, Homo sapiens
tttgtatttttagtagagac

SEQ ID NO: 12055 - DNA, 20 bp, Homo sapiens
ttgtatttttagtagagaca

SEQ ID NO: 12056 - DNA, 20 bp, Homo sapiens
gagacagggtttcaccatgt

SEQ ID NO: 12057 - DNA, 20 bp, Homo sapiens
cgagaccatcctggccaaca

SEQ ID NO: 12058 - DNA, 20 bp, Homo sapiens
agggtttcaccatgttggcc

SEQ ID NO: 12059 - DNA, 20 bp, Homo sapiens
tttcaccatgttggccagga

SEQ ID NO: 12060 - DNA, 20 bp, Homo sapiens
tcaggagatcgagaccatcc

SEQ ID NO: 12061 - DNA, 20 bp, Homo sapiens
gacaggtggatgacaaggtc

SEQ ID NO: 12062 - DNA, 20 bp, Homo sapiens
gccaagacaggtggatgaca

SEQ ID NO: 12063 - DNA, 20 bp, Homo sapiens
ctttgggaggccaagacagg

SEQ ID NO: 12064 - DNA, 20 bp, Homo sapiens
accttgtcatccacctgtct

SEQ ID NO: 12065 - DNA, 20 bp, Homo sapiens
gcactttgggaggccaagac

SEQ ID NO: 12066 - DNA, 20 bp, Homo sapiens
agtaatcccagcactttggg

SEQ ID NO: 12067 - DNA, 20 bp, Homo sapiens
gccagtaatcccagcacttt

SEQ ID NO: 12068 - DNA, 20 bp, Homo sapiens
gtcttggcctcccaaagtgc

SEQ ID NO: 12069 - DNA, 20 bp, Homo sapiens
tgccagtaatcccagcactt

SEQ ID NO: 12070 - DNA, 20 bp, Homo sapiens
tcttggcctcccaaagtgct

SEQ ID NO: 12071 - DNA, 20 bp, Homo sapiens
tcccaaagtgctgggattac

SEQ ID NO: 12072 - DNA, 20 bp, Homo sapiens
aatatccgggctgggcacag

SEQ ID NO: 12073 - DNA, 20 bp, Homo sapiens
atgagccactgtgcccagcc

SEQ ID NO: 12074 - DNA, 20 bp, Homo sapiens
aaaaaaaaaatatccgggct

SEQ ID NO: 12075 - DNA, 20 bp, Homo sapiens
taaaaaaaaaatatccgggc

SEQ ID NO: 12076 - DNA, 20 bp, Homo sapiens
taattaaaaaaaaaatatcc

SEQ ID NO: 12077 - DNA, 20 bp, Homo sapiens
ataattaaaaaaaaaatatc

SEQ ID NO: 12078 - DNA, 20 bp, Homo sapiens
tatttatttatttattgaga

SEQ ID NO: 12079 - DNA, 20 bp, Homo sapiens
ggagtcttgctctgtagccc

SEQ ID NO: 12080 - DNA, 20 bp, Homo sapiens
gcgccactgcactctggcct

SEQ ID NO: 12081 - DNA, 20 bp, Homo sapiens
cgcgccactgcactctggcc

SEQ ID NO: 12082 - DNA, 20 bp, Homo sapiens
gagatcgcgccactgcactc

SEQ ID NO: 12083 - DNA, 20 bp, Homo sapiens
tagcccaggccagagtgcag

SEQ ID NO: 12084 - DNA, 20 bp, Homo sapiens
tcactgcaagctctgcctcc

SEQ ID NO: 12085 - DNA, 20 bp, Homo sapiens
cactgcaagctctgcctccc

SEQ ID NO: 12086 - DNA, 20 bp, Homo sapiens
cagaatggcatgaacccggg

SEQ ID NO: 12087 - DNA, 20 bp, Homo sapiens
aggcagaatggcatgaaccc

SEQ ID NO: 12088 - DNA, 20 bp, Homo sapiens
gaggcagaatggcatgaacc

SEQ ID NO: 12089 - DNA, 20 bp, Homo sapiens
ctcaggaggctgaggcagaa

SEQ ID NO: 12090 - DNA, 20 bp, Homo sapiens
cccagctactcaggaggctg

SEQ ID NO: 12091 - DNA, 20 bp, Homo sapiens
tgtagtcccagctactcagg

SEQ ID NO: 12092 - DNA, 20 bp, Homo sapiens
gcctgtagtcccagctactc

SEQ ID NO: 12093 - DNA, 20 bp, Homo sapiens
gcctcagcctcctgagtagc

SEQ ID NO: 12094 - DNA, 20 bp, Homo sapiens
cctcagcctcctgagtagct

SEQ ID NO: 12095 - DNA, 20 bp, Homo sapiens
tcctgagtagctgggactac

SEQ ID NO: 12096 - DNA, 20 bp, Homo sapiens
aattagccgggcgtggtggc

SEQ ID NO: 12097 - DNA, 20 bp, Homo sapiens
aaattagccgggcgtggtgg

SEQ ID NO: 12098 - DNA, 20 bp, Homo sapiens
aaaaaattagccgggcgtgg

SEQ ID NO: 12099 - DNA, 20 bp, Homo sapiens
caggcgcccgccaccacgcc

SEQ ID NO: 12100 - DNA, 20 bp, Homo sapiens
caaaaaaaattagccgggcg

SEQ ID NO: 12101 - DNA, 20 bp, Homo sapiens
aaatacaaaaaaaattagcc

SEQ ID NO: 12102 - DNA, 20 bp, Homo sapiens
aaaatacaaaaaaaattagc

SEQ ID NO: 12103 - DNA, 20 bp, Homo sapiens
ttttgtatttttagtagaga

SEQ ID NO: 12104 - DNA, 20 bp, Homo sapiens
tttgtatttttagtagagac

SEQ ID NO: 12105 - DNA, 20 bp, Homo sapiens
ttgtatttttagtagagacg

SEQ ID NO: 12106 - DNA, 20 bp, Homo sapiens
ggggtttcatcgtgttaacc

SEQ ID NO: 12107 - DNA, 20 bp, Homo sapiens
tttcatcgtgttaaccagga

SEQ ID NO: 12108 - DNA, 20 bp, Homo sapiens
tcaggagatcgagaccatcc

SEQ ID NO: 12109 - DNA, 20 bp, Homo sapiens
ggtgggcagatcacgaggtc

SEQ ID NO: 12110 - DNA, 20 bp, Homo sapiens
gccgaggtgggcagatcacg

SEQ ID NO: 12111 - DNA, 20 bp, Homo sapiens
acctcgtgatctgcccacct

SEQ ID NO: 12112 - DNA, 20 bp, Homo sapiens
gcactgtgggaggccgaggt

SEQ ID NO: 12113 - DNA, 20 bp, Homo sapiens
agcactgtgggaggccgagg

SEQ ID NO: 12114 - DNA, 20 bp, Homo sapiens
cccagcactgtgggaggccg

SEQ ID NO: 12115 - DNA, 20 bp, Homo sapiens
ggtaatcccagcactgtggg

SEQ ID NO: 12116 - DNA, 20 bp, Homo sapiens
gccggtaatcccagcactgt

SEQ ID NO: 12117 - DNA, 20 bp, Homo sapiens
acctcggcctcccacagtgc

SEQ ID NO: 12118 - DNA, 20 bp, Homo sapiens
cgccggtaatcccagcactg

SEQ ID NO: 12119 - DNA, 20 bp, Homo sapiens
cctcggcctcccacagtgct

SEQ ID NO: 12120 - DNA, 20 bp, Homo sapiens
tcccacagtgctgggattac

SEQ ID NO: 12121 - DNA, 20 bp, Homo sapiens
ccaggcatggtggctcacgc

SEQ ID NO: 12122 - DNA, 20 bp, Homo sapiens
attatccgggccaggcatgg

SEQ ID NO: 12123 - DNA, 20 bp, Homo sapiens
ccggcgtgagccaccatgcc

SEQ ID NO: 12124 - DNA, 20 bp, Homo sapiens
aaaattatccgggccaggca

SEQ ID NO: 12125 - DNA, 20 bp, Homo sapiens
gtgagccaccatgcctggcc

SEQ ID NO: 12126 - DNA, 20 bp, Homo sapiens
taaaaaaaattatccgggcc

SEQ ID NO: 12127 - DNA, 20 bp, Homo sapiens
aaaattaaaaaaaattatcc

SEQ ID NO: 12128 - DNA, 20 bp, Homo sapiens
aaaaattaaaaaaaattatc

SEQ ID NO: 12129 - DNA, 20 bp, Homo sapiens
ttttaatttttgtagagacg

SEQ ID NO: 12130 - DNA, 20 bp, Homo sapiens
gaggtcttgtgatattgccc

SEQ ID NO: 12131 - DNA, 20 bp, Homo sapiens
caggagttgaagaacagcct

SEQ ID NO: 12132 - DNA, 20 bp, Homo sapiens
ccaggagttgaagaacagcc

SEQ ID NO: 12133 - DNA, 20 bp, Homo sapiens
ccaggctgttcttcaactcc

SEQ ID NO: 12134 - DNA, 20 bp, Homo sapiens
caggctgttcttcaactcct

SEQ ID NO: 12135 - DNA, 20 bp, Homo sapiens
tgggaggactgcttgagccc

SEQ ID NO: 12136 - DNA, 20 bp, Homo sapiens
ttctgggaggccaaggtggg

SEQ ID NO: 12137 - DNA, 20 bp, Homo sapiens
ctcaagcagtcctcccacct

SEQ ID NO: 12138 - DNA, 20 bp, Homo sapiens
gcattctgggaggccaaggt

SEQ ID NO: 12139 - DNA, 20 bp, Homo sapiens
agcattctgggaggccaagg

SEQ ID NO: 12140 - DNA, 20 bp, Homo sapiens
cccagcattctgggaggcca

SEQ ID NO: 12141 - DNA, 20 bp, Homo sapiens
tataaacccagcattctggg

SEQ ID NO: 12142 - DNA, 20 bp, Homo sapiens
atctataaacccagcattct

SEQ ID NO: 12143 - DNA, 20 bp, Homo sapiens
accttggcctcccagaatgc

SEQ ID NO: 12144 - DNA, 20 bp, Homo sapiens
catctataaacccagcattc

SEQ ID NO: 12145 - DNA, 20 bp, Homo sapiens
ccttggcctcccagaatgct

SEQ ID NO: 12146 - DNA, 20 bp, Homo sapiens
atagatgtgagccagcacac

SEQ ID NO: 12147 - DNA, 20 bp, Homo sapiens
cttcacttggcccggtgtgc

SEQ ID NO: 12148 - DNA, 20 bp, Homo sapiens
tagatgtgagccagcacacc

SEQ ID NO: 12149 - DNA, 20 bp, Homo sapiens
attagattcttcacttggcc

SEQ ID NO: 12150 - DNA, 20 bp, Homo sapiens
cattcattagattcttcact

SEQ ID NO: 12151 - DNA, 20 bp, Homo sapiens
attcattagatgctacaatt

SEQ ID NO: 12152 - DNA, 20 bp, Homo sapiens
ctcaatttttccagcaatgg

SEQ ID NO: 12153 - DNA, 20 bp, Homo sapiens
aatgaatgttccaccattgc

SEQ ID NO: 12154 - DNA, 20 bp, Homo sapiens
catctcaatttttccagcaa

SEQ ID NO: 12155 - DNA, 20 bp, Homo sapiens
cattgctggaaaaattgaga

SEQ ID NO: 12156 - DNA, 20 bp, Homo sapiens
agacgctggccaactagaga

SEQ ID NO: 12157 - DNA, 20 bp, Homo sapiens
gaaaacaaaccatctctagt

SEQ ID NO: 12158 - DNA, 20 bp, Homo sapiens
ctgtgaacagagcaagacgc

SEQ ID NO: 12159 - DNA, 20 bp, Homo sapiens
cttgctctgttcacagtctc

SEQ ID NO: 12160 - DNA, 20 bp, Homo sapiens
ttcacagtctctggaaaagc

SEQ ID NO: 12161 - DNA, 20 bp, Homo sapiens
tcacagtctctggaaaagct

SEQ ID NO: 12162 - DNA, 20 bp, Homo sapiens
cacagtctctggaaaagctg

SEQ ID NO: 12163 - DNA, 20 bp, Homo sapiens
tctggaaaagctggggtagt

SEQ ID NO: 12164 - DNA, 20 bp, Homo sapiens
ggggtagttggtgagcagag

SEQ ID NO: 12165 - DNA, 20 bp, Homo sapiens
gggtagttggtgagcagagc

SEQ ID NO: 12166 - DNA, 20 bp, Homo sapiens
tgaggggctgtggggcttgt

SEQ ID NO: 12167 - DNA, 20 bp, Homo sapiens
aaagtctttgaggggctgtg

SEQ ID NO: 12168 - DNA, 20 bp, Homo sapiens
aaaagtctttgaggggctgt

SEQ ID NO: 12169 - DNA, 20 bp, Homo sapiens
aaaaagtctttgaggggctg

SEQ ID NO: 12170 - DNA, 20 bp, Homo sapiens
aacaaaaaaaagtctttgag

SEQ ID NO: 12171 - DNA, 20 bp, Homo sapiens
aaacaaaaaaaagtctttga

SEQ ID NO: 12172 - DNA, 20 bp, Homo sapiens
caaacaaaaaaaagtctttg

SEQ ID NO: 12173 - DNA, 20 bp, Homo sapiens
tttgtttgttttgagcagac

SEQ ID NO: 12174 - DNA, 20 bp, Homo sapiens
gacaggctaaaatgtgaacg

SEQ ID NO: 12175 - DNA, 20 bp, Homo sapiens
acaggctaaaatgtgaacgt

SEQ ID NO: 12176 - DNA, 20 bp, Homo sapiens
caggctaaaatgtgaacgtg

SEQ ID NO: 12177 - DNA, 20 bp, Homo sapiens
taaaatgtgaacgtggggtg

SEQ ID NO: 12178 - DNA, 20 bp, Homo sapiens
aaaatgtgaacgtggggtga

SEQ ID NO: 12179 - DNA, 20 bp, Homo sapiens
gtgagggatcactgccaaaa

SEQ ID NO: 12180 - DNA, 20 bp, Homo sapiens
ctccagaagctgtaccattt

SEQ ID NO: 12181 - DNA, 20 bp, Homo sapiens
tgccaaaatggtacagcttc

SEQ ID NO: 12182 - DNA, 20 bp, Homo sapiens
cttctggagcagaactttcc

SEQ ID NO: 12183 - DNA, 20 bp, Homo sapiens
ttctggagcagaactttcca

SEQ ID NO: 12184 - DNA, 20 bp, Homo sapiens
aaaaagtgtccctggatccc

SEQ ID NO: 12185 - DNA, 20 bp, Homo sapiens
gcagaactttccagggatcc

SEQ ID NO: 12186 - DNA, 20 bp, Homo sapiens
cagaactttccagggatcca

SEQ ID NO: 12187 - DNA, 20 bp, Homo sapiens
gctttaaaaaaaagtgtccc

SEQ ID NO: 12188 - DNA, 20 bp, Homo sapiens
cacccaatatatggagctct

SEQ ID NO: 12189 - DNA, 20 bp, Homo sapiens
ctgccaagagctccatatat

SEQ ID NO: 12190 - DNA, 20 bp, Homo sapiens
tgccaagagctccatatatt

SEQ ID NO: 12191 - DNA, 20 bp, Homo sapiens
ctgaactcacacccaatata

SEQ ID NO: 12192 - DNA, 20 bp, Homo sapiens
catatattgggtgtgagttc

SEQ ID NO: 12193 - DNA, 20 bp, Homo sapiens
ccaacttccttcattgtgag

SEQ ID NO: 12194 - DNA, 20 bp, Homo sapiens
caggttgcctctcacaatga

SEQ ID NO: 12195 - DNA, 20 bp, Homo sapiens
cctctcacaatgaaggaagt

SEQ ID NO: 12196 - DNA, 20 bp, Homo sapiens
ggaagttggtctttgtctgc

SEQ ID NO: 12197 - DNA, 20 bp, Homo sapiens
agttggtctttgtctgcagg

SEQ ID NO: 12198 - DNA, 20 bp, Homo sapiens
gttggtctttgtctgcaggt

SEQ ID NO: 12199 - DNA, 20 bp, Homo sapiens
tgtctgcaggtgggctgctg

SEQ ID NO: 12200 - DNA, 20 bp, Homo sapiens
gtctgcaggtgggctgctga

SEQ ID NO: 12201 - DNA, 20 bp, Homo sapiens
caggtgggctgctgagggtc

SEQ ID NO: 12202 - DNA, 20 bp, Homo sapiens
aggtgggctgctgagggtct

SEQ ID NO: 12203 - DNA, 20 bp, Homo sapiens
agggtctgggatctgttttc

SEQ ID NO: 12204 - DNA, 20 bp, Homo sapiens
tctgttttctggaagtgtgc

SEQ ID NO: 12205 - DNA, 20 bp, Homo sapiens
cagtttgtcacaagcacaga

SEQ ID NO: 12206 - DNA, 20 bp, Homo sapiens
ccagtttgtcacaagcacag

SEQ ID NO: 12207 - DNA, 20 bp, Homo sapiens
cctctgtgcttgtgacaaac

SEQ ID NO: 12208 - DNA, 20 bp, Homo sapiens
tgtgcttgtgacaaactggc

SEQ ID NO: 12209 - DNA, 20 bp, Homo sapiens
acagtggttagcaatgagca

SEQ ID NO: 12210 - DNA, 20 bp, Homo sapiens
gggagttcagggacagacag

SEQ ID NO: 12211 - DNA, 20 bp, Homo sapiens
gtagtggttctgggagttca

SEQ ID NO: 12212 - DNA, 20 bp, Homo sapiens
tgtagtggttctgggagttc

SEQ ID NO: 12213 - DNA, 20 bp, Homo sapiens
aagccagatgtagtggttct

SEQ ID NO: 12214 - DNA, 20 bp, Homo sapiens
aaagccagatgtagtggttc

SEQ ID NO: 12215 - DNA, 20 bp, Homo sapiens
ctgcccaaagccagatgtag

SEQ ID NO: 12216 - DNA, 20 bp, Homo sapiens
actcccagaaccactacatc

SEQ ID NO: 12217 - DNA, 20 bp, Homo sapiens
agaaccactacatctggctt

SEQ ID NO: 12218 - DNA, 20 bp, Homo sapiens
gaaccactacatctggcttt

SEQ ID NO: 12219 - DNA, 20 bp, Homo sapiens
cactacatctggctttgggc

SEQ ID NO: 12220 - DNA, 20 bp, Homo sapiens
tctgagataaaacgatctaa

SEQ ID NO: 12221 - DNA, 20 bp, Homo sapiens
agataaaacgatctaaaggt

SEQ ID NO: 12222 - DNA, 20 bp, Homo sapiens
atctaaaggtaggcagaccc

SEQ ID NO: 12223 - DNA, 20 bp, Homo sapiens
tggatctgaggctgggtcca

SEQ ID NO: 12224 - DNA, 20 bp, Homo sapiens
ctggatctgaggctgggtcc

SEQ ID NO: 12225 - DNA, 20 bp, Homo sapiens
tcctgcctggatctgaggct

SEQ ID NO: 12226 - DNA, 20 bp, Homo sapiens
ctcctgcctggatctgaggc

SEQ ID NO: 12227 - DNA, 20 bp, Homo sapiens
cgtgctcctgcctggatctg

SEQ ID NO: 12228 - DNA, 20 bp, Homo sapiens
ctggacccagcctcagatcc

SEQ ID NO: 12229 - DNA, 20 bp, Homo sapiens
acccagcctcagatccaggc

SEQ ID NO: 12230 - DNA, 20 bp, Homo sapiens
ccagacctcgtgctcctgcc

SEQ ID NO: 12231 - DNA, 20 bp, Homo sapiens
cagatccaggcaggagcacg

SEQ ID NO: 12232 - DNA, 20 bp, Homo sapiens
ccaggcaggagcacgaggtc

SEQ ID NO: 12233 - DNA, 20 bp, Homo sapiens
aggagcacgaggtctggcca

SEQ ID NO: 12234 - DNA, 20 bp, Homo sapiens
agcacgaggtctggccaagg

SEQ ID NO: 12235 - DNA, 20 bp, Homo sapiens
ctcgacaaccccgtccacct

SEQ ID NO: 12236 - DNA, 20 bp, Homo sapiens
cgaggtctggccaaggtgga

SEQ ID NO: 12237 - DNA, 20 bp, Homo sapiens
gaggtctggccaaggtggac

SEQ ID NO: 12238 - DNA, 20 bp, Homo sapiens
aggtctggccaaggtggacg

SEQ ID NO: 12239 - DNA, 20 bp, Homo sapiens
gacggggttgtcgagatctc

SEQ ID NO: 12240 - DNA, 20 bp, Homo sapiens
accctccaaaaaacagcaag

SEQ ID NO: 12241 - DNA, 20 bp, Homo sapiens
caccctccaaaaaacagcaa

SEQ ID NO: 12242 - DNA, 20 bp, Homo sapiens
tcaccctccaaaaaacagca

SEQ ID NO: 12243 - DNA, 20 bp, Homo sapiens
aggagccccttgctgttttt

SEQ ID NO: 12244 - DNA, 20 bp, Homo sapiens
agccccttgctgttttttgg

SEQ ID NO: 12245 - DNA, 20 bp, Homo sapiens
gccccttgctgttttttgga

SEQ ID NO: 12246 - DNA, 20 bp, Homo sapiens
atcagagctgactatgttta

SEQ ID NO: 12247 - DNA, 20 bp, Homo sapiens
gggtctggatgagtagacag

SEQ ID NO: 12248 - DNA, 20 bp, Homo sapiens
ggggtctggatgagtagaca

SEQ ID NO: 12249 - DNA, 20 bp, Homo sapiens
tggggtctggatgagtagac

SEQ ID NO: 12250 - DNA, 20 bp, Homo sapiens
aagcctacaggcatggggtc

SEQ ID NO: 12251 - DNA, 20 bp, Homo sapiens
ctgataagcctacaggcatg

SEQ ID NO: 12252 - DNA, 20 bp, Homo sapiens
cctgataagcctacaggcat

SEQ ID NO: 12253 - DNA, 20 bp, Homo sapiens
ccctgataagcctacaggca

SEQ ID NO: 12254 - DNA, 20 bp, Homo sapiens
catccagaccccatgcctgt

SEQ ID NO: 12255 - DNA, 20 bp, Homo sapiens
taactccctgataagcctac

SEQ ID NO: 12256 - DNA, 20 bp, Homo sapiens
cccatgcctgtaggcttatc

SEQ ID NO: 12257 - DNA, 20 bp, Homo sapiens
ccatgcctgtaggcttatca

SEQ ID NO: 12258 - DNA, 20 bp, Homo sapiens
tcacccgtggcagctgagtt

SEQ ID NO: 12259 - DNA, 20 bp, Homo sapiens
ctcacccgtggcagctgagt

SEQ ID NO: 12260 - DNA, 20 bp, Homo sapiens
tgttcccaactcagctgcca

SEQ ID NO: 12261 - DNA, 20 bp, Homo sapiens
gttcccaactcagctgccac

SEQ ID NO: 12262 - DNA, 20 bp, Homo sapiens
acctcctgctctctcacccg

SEQ ID NO: 12263 - DNA, 20 bp, Homo sapiens
gctgccacgggtgagagagc

SEQ ID NO: 12264 - DNA, 20 bp, Homo sapiens
gccacgggtgagagagcagg

SEQ ID NO: 12265 - DNA, 20 bp, Homo sapiens
ttggctgccaactccagtca

SEQ ID NO: 12266 - DNA, 20 bp, Homo sapiens
cttggctgccaactccagtc

SEQ ID NO: 12267 - DNA, 20 bp, Homo sapiens
ctggagttggcagccaagcc

SEQ ID NO: 12268 - DNA, 20 bp, Homo sapiens
gcccactccagggcctggct

SEQ ID NO: 12269 - DNA, 20 bp, Homo sapiens
ttggcagccaagccaggccc

SEQ ID NO: 12270 - DNA, 20 bp, Homo sapiens
tgggtgcccactccagggcc

SEQ ID NO: 12271 - DNA, 20 bp, Homo sapiens
agccaagccaggccctggag

SEQ ID NO: 12272 - DNA, 20 bp, Homo sapiens
gccaagccaggccctggagt

SEQ ID NO: 12273 - DNA, 20 bp, Homo sapiens
ccctctgggtgcccactcca

SEQ ID NO: 12274 - DNA, 20 bp, Homo sapiens
tccctctgggtgcccactcc

SEQ ID NO: 12275 - DNA, 20 bp, Homo sapiens
gccctggagtgggcacccag

SEQ ID NO: 12276 - DNA, 20 bp, Homo sapiens
ccctggagtgggcacccaga

SEQ ID NO: 12277 - DNA, 20 bp, Homo sapiens
agccaacctgtcttccctct

SEQ ID NO: 12278 - DNA, 20 bp, Homo sapiens
tagccaacctgtcttccctc

SEQ ID NO: 12279 - DNA, 20 bp, Homo sapiens
tgggcacccagagggaagac

SEQ ID NO: 12280 - DNA, 20 bp, Homo sapiens
cacccagagggaagacaggt

SEQ ID NO: 12281 - DNA, 20 bp, Homo sapiens
agacaggttggctaatttcc

SEQ ID NO: 12282 - DNA, 20 bp, Homo sapiens
cttgcacccttaggggctcc

SEQ ID NO: 12283 - DNA, 20 bp, Homo sapiens
ctaatttcctggagccccta

SEQ ID NO: 12284 - DNA, 20 bp, Homo sapiens
taatttcctggagcccctaa

SEQ ID NO: 12285 - DNA, 20 bp, Homo sapiens
gcctacccttgcacccttag

SEQ ID NO: 12286 - DNA, 20 bp, Homo sapiens
ggcctacccttgcaccctta

SEQ ID NO: 12287 - DNA, 20 bp, Homo sapiens
aggcctacccttgcaccctt

SEQ ID NO: 12288 - DNA, 20 bp, Homo sapiens
ctggagcccctaagggtgca

SEQ ID NO: 12289 - DNA, 20 bp, Homo sapiens
tggagcccctaagggtgcaa

SEQ ID NO: 12290 - DNA, 20 bp, Homo sapiens
gcccctaagggtgcaagggt

SEQ ID NO: 12291 - DNA, 20 bp, Homo sapiens
cctcctccctcagacacaga

SEQ ID NO: 12292 - DNA, 20 bp, Homo sapiens
gggtaggccttctgtgtctg

SEQ ID NO: 12293 - DNA, 20 bp, Homo sapiens
ggtaggccttctgtgtctga

SEQ ID NO: 12294 - DNA, 20 bp, Homo sapiens
aggccttctgtgtctgaggg

SEQ ID NO: 12295 - DNA, 20 bp, Homo sapiens
ccttctgtgtctgagggagg

SEQ ID NO: 12296 - DNA, 20 bp, Homo sapiens
cttctgtgtctgagggagga

SEQ ID NO: 12297 - DNA, 20 bp, Homo sapiens
tgtgtctgagggaggagggc

SEQ ID NO: 12298 - DNA, 20 bp, Homo sapiens
gtgtctgagggaggagggct

SEQ ID NO: 12299 - DNA, 20 bp, Homo sapiens
tgtctgagggaggagggctg

SEQ ID NO: 12300 - DNA, 20 bp, Homo sapiens
agggaggagggctggggctc

SEQ ID NO: 12301 - DNA, 20 bp, Homo sapiens
gggctggggctctggactcc

SEQ ID NO: 12302 - DNA, 20 bp, Homo sapiens
ggctggggctctggactcct

SEQ ID NO: 12303 - DNA, 20 bp, Homo sapiens
acccctcctccctcagaccc

SEQ ID NO: 12304 - DNA, 20 bp, Homo sapiens
gctctggactcctgggtctg

SEQ ID NO: 12305 - DNA, 20 bp, Homo sapiens
ctctggactcctgggtctga

SEQ ID NO: 12306 - DNA, 20 bp, Homo sapiens
tggactcctgggtctgaggg

SEQ ID NO: 12307 - DNA, 20 bp, Homo sapiens
actcctgggtctgagggagg

SEQ ID NO: 12308 - DNA, 20 bp, Homo sapiens
ctcctgggtctgagggagga

SEQ ID NO: 12309 - DNA, 20 bp, Homo sapiens
tcctgggtctgagggaggag

SEQ ID NO: 12310 - DNA, 20 bp, Homo sapiens
tgggtctgagggaggagggg

SEQ ID NO: 12311 - DNA, 20 bp, Homo sapiens
gggtctgagggaggaggggt

SEQ ID NO: 12312 - DNA, 20 bp, Homo sapiens
ggtctgagggaggaggggtg

SEQ ID NO: 12313 - DNA, 20 bp, Homo sapiens
gtctgagggaggaggggtgg

SEQ ID NO: 12314 - DNA, 20 bp, Homo sapiens
tctgagggaggaggggtggg

SEQ ID NO: 12315 - DNA, 20 bp, Homo sapiens
gggaggaggggtggggggcc

SEQ ID NO: 12316 - DNA, 20 bp, Homo sapiens
tccctcagacccaggagtcc

SEQ ID NO: 12317 - DNA, 20 bp, Homo sapiens
gggtggggggcctggactcc

SEQ ID NO: 12318 - DNA, 20 bp, Homo sapiens
ggtggggggcctggactcct

SEQ ID NO: 12319 - DNA, 20 bp, Homo sapiens
gaccctcctccctcagaccc

SEQ ID NO: 12320 - DNA, 20 bp, Homo sapiens
ggcctggactcctgggtctg

SEQ ID NO: 12321 - DNA, 20 bp, Homo sapiens
gcctggactcctgggtctga

SEQ ID NO: 12322 - DNA, 20 bp, Homo sapiens
tggactcctgggtctgaggg

SEQ ID NO: 12323 - DNA, 20 bp, Homo sapiens
actcctgggtctgagggagg

SEQ ID NO: 12324 - DNA, 20 bp, Homo sapiens
ctcctgggtctgagggagga

SEQ ID NO: 12325 - DNA, 20 bp, Homo sapiens
gggtctgagggaggagggtc

SEQ ID NO: 12326 - DNA, 20 bp, Homo sapiens
ggtctgagggaggagggtct

SEQ ID NO: 12327 - DNA, 20 bp, Homo sapiens
tccctcagatccaggagtac

SEQ ID NO: 12328 - DNA, 20 bp, Homo sapiens
agggtctgggcctgtactcc

SEQ ID NO: 12329 - DNA, 20 bp, Homo sapiens
gcccctcctccctcagatcc

SEQ ID NO: 12330 - DNA, 20 bp, Homo sapiens
ggcctgtactcctggatctg

SEQ ID NO: 12331 - DNA, 20 bp, Homo sapiens
gcctgtactcctggatctga

SEQ ID NO: 12332 - DNA, 20 bp, Homo sapiens
tgtactcctggatctgaggg

SEQ ID NO: 12333 - DNA, 20 bp, Homo sapiens
actcctggatctgagggagg

SEQ ID NO: 12334 - DNA, 20 bp, Homo sapiens
ctcctggatctgagggagga

SEQ ID NO: 12335 - DNA, 20 bp, Homo sapiens
tcctggatctgagggaggag

SEQ ID NO: 12336 - DNA, 20 bp, Homo sapiens
ggatctgagggaggaggggc

SEQ ID NO: 12337 - DNA, 20 bp, Homo sapiens
gatctgagggaggaggggct

SEQ ID NO: 12338 - DNA, 20 bp, Homo sapiens
atctgagggaggaggggctg

SEQ ID NO: 12339 - DNA, 20 bp, Homo sapiens
ggaggaggggctggggaact

SEQ ID NO: 12340 - DNA, 20 bp, Homo sapiens
gaggaggggctggggaactt

SEQ ID NO: 12341 - DNA, 20 bp, Homo sapiens
ggctggggaacttgggctcc

SEQ ID NO: 12342 - DNA, 20 bp, Homo sapiens
gctggggaacttgggctcct

SEQ ID NO: 12343 - DNA, 20 bp, Homo sapiens
ctccctcctccctcagaccc

SEQ ID NO: 12344 - DNA, 20 bp, Homo sapiens
aacttgggctcctgggtctg

SEQ ID NO: 12345 - DNA, 20 bp, Homo sapiens
acttgggctcctgggtctga

SEQ ID NO: 12346 - DNA, 20 bp, Homo sapiens
tgggctcctgggtctgaggg

SEQ ID NO: 12347 - DNA, 20 bp, Homo sapiens
gctcctgggtctgagggagg

SEQ ID NO: 12348 - DNA, 20 bp, Homo sapiens
ctcctgggtctgagggagga

SEQ ID NO: 12349 - DNA, 20 bp, Homo sapiens
tctgagggaggagggagctt

SEQ ID NO: 12350 - DNA, 20 bp, Homo sapiens
gggaggagggagctttggtc

SEQ ID NO: 12351 - DNA, 20 bp, Homo sapiens
ggagctttggtctggactcc

SEQ ID NO: 12352 - DNA, 20 bp, Homo sapiens
gagctttggtctggactcct

SEQ ID NO: 12353 - DNA, 20 bp, Homo sapiens
gcccctactccctcagaccc

SEQ ID NO: 12354 - DNA, 20 bp, Homo sapiens
ggtctggactcctgggtctg

SEQ ID NO: 12355 - DNA, 20 bp, Homo sapiens
gtctggactcctgggtctga

SEQ ID NO: 12356 - DNA, 20 bp, Homo sapiens
actcctgggtctgagggagt

SEQ ID NO: 12357 - DNA, 20 bp, Homo sapiens
ctcctgggtctgagggagta

SEQ ID NO: 12358 - DNA, 20 bp, Homo sapiens
tcctgggtctgagggagtag

SEQ ID NO: 12359 - DNA, 20 bp, Homo sapiens
ggtctgagggagtaggggct

SEQ ID NO: 12360 - DNA, 20 bp, Homo sapiens
gtctgagggagtaggggcta

SEQ ID NO: 12361 - DNA, 20 bp, Homo sapiens
gggagtaggggctagggatc

SEQ ID NO: 12362 - DNA, 20 bp, Homo sapiens
gggctagggatctggactcg

SEQ ID NO: 12363 - DNA, 20 bp, Homo sapiens
ggctagggatctggactcgt

SEQ ID NO: 12364 - DNA, 20 bp, Homo sapiens
gatctggactcgtgggtgtg

SEQ ID NO: 12365 - DNA, 20 bp, Homo sapiens
tggactcgtgggtgtgagga

SEQ ID NO: 12366 - DNA, 20 bp, Homo sapiens
actcgtgggtgtgaggaagg

SEQ ID NO: 12367 - DNA, 20 bp, Homo sapiens
ctcgtgggtgtgaggaagga

SEQ ID NO: 12368 - DNA, 20 bp, Homo sapiens
tcgtgggtgtgaggaaggag

SEQ ID NO: 12369 - DNA, 20 bp, Homo sapiens
gggtgtgaggaaggaggggc

SEQ ID NO: 12370 - DNA, 20 bp, Homo sapiens
ggtgtgaggaaggaggggct

SEQ ID NO: 12371 - DNA, 20 bp, Homo sapiens
gtgtgaggaaggaggggctg

SEQ ID NO: 12372 - DNA, 20 bp, Homo sapiens
ggaaggaggggctggggtcc

SEQ ID NO: 12373 - DNA, 20 bp, Homo sapiens
ttcctcagacccaggagtcc

SEQ ID NO: 12374 - DNA, 20 bp, Homo sapiens
gggctggggtcctggactcc

SEQ ID NO: 12375 - DNA, 20 bp, Homo sapiens
ggctggggtcctggactcct

SEQ ID NO: 12376 - DNA, 20 bp, Homo sapiens
gcccctccttcctcagaccc

SEQ ID NO: 12377 - DNA, 20 bp, Homo sapiens
gtcctggactcctgggtctg

SEQ ID NO: 12378 - DNA, 20 bp, Homo sapiens
tggactcctgggtctgagga

SEQ ID NO: 12379 - DNA, 20 bp, Homo sapiens
actcctgggtctgaggaagg

SEQ ID NO: 12380 - DNA, 20 bp, Homo sapiens
ctcctgggtctgaggaagga

SEQ ID NO: 12381 - DNA, 20 bp, Homo sapiens
tcctgggtctgaggaaggag

SEQ ID NO: 12382 - DNA, 20 bp, Homo sapiens
gggtctgaggaaggaggggc

SEQ ID NO: 12383 - DNA, 20 bp, Homo sapiens
ggtctgaggaaggaggggca

SEQ ID NO: 12384 - DNA, 20 bp, Homo sapiens
gtctgaggaaggaggggcag

SEQ ID NO: 12385 - DNA, 20 bp, Homo sapiens
tctgaggaaggaggggcagg

SEQ ID NO: 12386 - DNA, 20 bp, Homo sapiens
ggaaggaggggcagggggct

SEQ ID NO: 12387 - DNA, 20 bp, Homo sapiens
gggcagggggcttggactcc

SEQ ID NO: 12388 - DNA, 20 bp, Homo sapiens
ggcagggggcttggactcct

SEQ ID NO: 12389 - DNA, 20 bp, Homo sapiens
gcccctccttcctcagaccc

SEQ ID NO: 12390 - DNA, 20 bp, Homo sapiens
ggcttggactcctgggtctg

SEQ ID NO: 12391 - DNA, 20 bp, Homo sapiens
tggactcctgggtctgagga

SEQ ID NO: 12392 - DNA, 20 bp, Homo sapiens
actcctgggtctgaggaagg

SEQ ID NO: 12393 - DNA, 20 bp, Homo sapiens
ctcctgggtctgaggaagga

SEQ ID NO: 12394 - DNA, 20 bp, Homo sapiens
tcctgggtctgaggaaggag

SEQ ID NO: 12395 - DNA, 20 bp, Homo sapiens
gggtctgaggaaggaggggc

SEQ ID NO: 12396 - DNA, 20 bp, Homo sapiens
ggtctgaggaaggaggggcc

SEQ ID NO: 12397 - DNA, 20 bp, Homo sapiens
ggaaggaggggccgggagcc

SEQ ID NO: 12398 - DNA, 20 bp, Homo sapiens
gacttaggagtccaggctcc

SEQ ID NO: 12399 - DNA, 20 bp, Homo sapiens
tccctcagacttaggagtcc

SEQ ID NO: 12400 - DNA, 20 bp, Homo sapiens
gaccctcctccctcagactt

SEQ ID NO: 12401 - DNA, 20 bp, Homo sapiens
agcctggactcctaagtctg

SEQ ID NO: 12402 - DNA, 20 bp, Homo sapiens
gcctggactcctaagtctga

SEQ ID NO: 12403 - DNA, 20 bp, Homo sapiens
tggactcctaagtctgaggg

SEQ ID NO: 12404 - DNA, 20 bp, Homo sapiens
actcctaagtctgagggagg

SEQ ID NO: 12405 - DNA, 20 bp, Homo sapiens
ctcctaagtctgagggagga

SEQ ID NO: 12406 - DNA, 20 bp, Homo sapiens
aagtctgagggaggagggtc

SEQ ID NO: 12407 - DNA, 20 bp, Homo sapiens
agtctgagggaggagggtct

SEQ ID NO: 12408 - DNA, 20 bp, Homo sapiens
gtctgagggaggagggtctg

SEQ ID NO: 12409 - DNA, 20 bp, Homo sapiens
tctgagggaggagggtctgg

SEQ ID NO: 12410 - DNA, 20 bp, Homo sapiens
gggaggagggtctgggggcc

SEQ ID NO: 12411 - DNA, 20 bp, Homo sapiens
ctgctcacacccagcagtcc

SEQ ID NO: 12412 - DNA, 20 bp, Homo sapiens
ggtctgggggcctggactgc

SEQ ID NO: 12413 - DNA, 20 bp, Homo sapiens
gtctgggggcctggactgct

SEQ ID NO: 12414 - DNA, 20 bp, Homo sapiens
gactgctgggtgtgagcaga

SEQ ID NO: 12415 - DNA, 20 bp, Homo sapiens
actgctgggtgtgagcagaa

SEQ ID NO: 12416 - DNA, 20 bp, Homo sapiens
tgggtgtgagcagaagggtc

SEQ ID NO: 12417 - DNA, 20 bp, Homo sapiens
gggtgtgagcagaagggtct

SEQ ID NO: 12418 - DNA, 20 bp, Homo sapiens
gagcagaagggtctgggtgc

SEQ ID NO: 12419 - DNA, 20 bp, Homo sapiens
agcagaagggtctgggtgct

SEQ ID NO: 12420 - DNA, 20 bp, Homo sapiens
ggtgctgggagtcccgagcc

SEQ ID NO: 12421 - DNA, 20 bp, Homo sapiens
gtgctgggagtcccgagcct

SEQ ID NO: 12422 - DNA, 20 bp, Homo sapiens
accatcatctccccaggctc

SEQ ID NO: 12423 - DNA, 20 bp, Homo sapiens
tgctgggagtcccgagcctg

SEQ ID NO: 12424 - DNA, 20 bp, Homo sapiens
aaccatcatctccccaggct

SEQ ID NO: 12425 - DNA, 20 bp, Homo sapiens
agtttaaccatcatctcccc

SEQ ID NO: 12426 - DNA, 20 bp, Homo sapiens
tcccgagcctggggagatga

SEQ ID NO: 12427 - DNA, 20 bp, Homo sapiens
ggagatgatggttaaacttc

SEQ ID NO: 12428 - DNA, 20 bp, Homo sapiens
gagatgatggttaaacttct

SEQ ID NO: 12429 - DNA, 20 bp, Homo sapiens
tacatcaatgtcaaagactc

SEQ ID NO: 12430 - DNA, 20 bp, Homo sapiens
tgacattgatgtatcttgaa

SEQ ID NO: 12431 - DNA, 20 bp, Homo sapiens
gacattgatgtatcttgaat

SEQ ID NO: 12432 - DNA, 20 bp, Homo sapiens
attgatgtatcttgaatggg

SEQ ID NO: 12433 - DNA, 20 bp, Homo sapiens
ttgatgtatcttgaatggga

SEQ ID NO: 12434 - DNA, 20 bp, Homo sapiens
tgaatgggagggtcagtctg

SEQ ID NO: 12435 - DNA, 20 bp, Homo sapiens
gaatgggagggtcagtctgt

SEQ ID NO: 12436 - DNA, 20 bp, Homo sapiens
aatgggagggtcagtctgtg

SEQ ID NO: 12437 - DNA, 20 bp, Homo sapiens
ggagggtcagtctgtgggga

SEQ ID NO: 12438 - DNA, 20 bp, Homo sapiens
tctgtggggaaggattaccc

SEQ ID NO: 12439 - DNA, 20 bp, Homo sapiens
agtctcttgcctcggcacct

SEQ ID NO: 12440 - DNA, 20 bp, Homo sapiens
cagtctcttgcctcggcacc

SEQ ID NO: 12441 - DNA, 20 bp, Homo sapiens
gaaggattacccaggtgccg

SEQ ID NO: 12442 - DNA, 20 bp, Homo sapiens
gtgccttcagtctcttgcct

SEQ ID NO: 12443 - DNA, 20 bp, Homo sapiens
gtgccgaggcaagagactga

SEQ ID NO: 12444 - DNA, 20 bp, Homo sapiens
attagatatagagatgatca

SEQ ID NO: 12445 - DNA, 20 bp, Homo sapiens
gttgtataactaatataacc

SEQ ID NO: 12446 - DNA, 20 bp, Homo sapiens
tatacccaccggttgtttcc

SEQ ID NO: 12447 - DNA, 20 bp, Homo sapiens
taatataaccaggaaacaac

SEQ ID NO: 12448 - DNA, 20 bp, Homo sapiens
tataaccaggaaacaaccgg

SEQ ID NO: 12449 - DNA, 20 bp, Homo sapiens
ataaccaggaaacaaccggt

SEQ ID NO: 12450 - DNA, 20 bp, Homo sapiens
gtacctgaccctatacccac

SEQ ID NO: 12451 - DNA, 20 bp, Homo sapiens
aggaaacaaccggtgggtat

SEQ ID NO: 12452 - DNA, 20 bp, Homo sapiens
ggaaacaaccggtgggtata

SEQ ID NO: 12453 - DNA, 20 bp, Homo sapiens
caaccggtgggtatagggtc

SEQ ID NO: 12454 - DNA, 20 bp, Homo sapiens
ggtatagggtcaggtactga

SEQ ID NO: 12455 - DNA, 20 bp, Homo sapiens
gtatagggtcaggtactgaa

SEQ ID NO: 12456 - DNA, 20 bp, Homo sapiens
attgtgagaagtgacctaga

SEQ ID NO: 12457 - DNA, 20 bp, Homo sapiens
aggctcacctcttgccttct

SEQ ID NO: 12458 - DNA, 20 bp, Homo sapiens
gaagtgacctagaaggcaag

SEQ ID NO: 12459 - DNA, 20 bp, Homo sapiens
ccttatgccggtgtgacaga

SEQ ID NO: 12460 - DNA, 20 bp, Homo sapiens
aggtgagccttctgtcacac

SEQ ID NO: 12461 - DNA, 20 bp, Homo sapiens
ccttctgtcacaccggcata

SEQ ID NO: 12462 - DNA, 20 bp, Homo sapiens
cttctgtcacaccggcataa

SEQ ID NO: 12463 - DNA, 20 bp, Homo sapiens
ccctcaagaggcccttatgc

SEQ ID NO: 12464 - DNA, 20 bp, Homo sapiens
accggcataagggcctcttg

SEQ ID NO: 12465 - DNA, 20 bp, Homo sapiens
ccggcataagggcctcttga

SEQ ID NO: 12466 - DNA, 20 bp, Homo sapiens
ttgaccaaggagccctcaag

SEQ ID NO: 12467 - DNA, 20 bp, Homo sapiens
agggcctcttgagggctcct

SEQ ID NO: 12468 - DNA, 20 bp, Homo sapiens
ctggcgttcccgcttgacca

SEQ ID NO: 12469 - DNA, 20 bp, Homo sapiens
ttgagggctccttggtcaag

SEQ ID NO: 12470 - DNA, 20 bp, Homo sapiens
tgagggctccttggtcaagc

SEQ ID NO: 12471 - DNA, 20 bp, Homo sapiens
caagcgggaacgccagtgtc

SEQ ID NO: 12472 - DNA, 20 bp, Homo sapiens
aagcgggaacgccagtgtct

SEQ ID NO: 12473 - DNA, 20 bp, Homo sapiens
acgggtgccttcccagacac

SEQ ID NO: 12474 - DNA, 20 bp, Homo sapiens
gggaacgccagtgtctggga

SEQ ID NO: 12475 - DNA, 20 bp, Homo sapiens
ttcgtggtctgctgagtaac

SEQ ID NO: 12476 - DNA, 20 bp, Homo sapiens
tttcgtggtctgctgagtaa

SEQ ID NO: 12477 - DNA, 20 bp, Homo sapiens
gttactcagcagaccacgaa

SEQ ID NO: 12478 - DNA, 20 bp, Homo sapiens
ttactcagcagaccacgaaa

SEQ ID NO: 12479 - DNA, 20 bp, Homo sapiens
gaaaaggagattccctttcg

SEQ ID NO: 12480 - DNA, 20 bp, Homo sapiens
gaaagggaatctccttttct

SEQ ID NO: 12481 - DNA, 20 bp, Homo sapiens
tccctgactcctccaagaaa

SEQ ID NO: 12482 - DNA, 20 bp, Homo sapiens
agggaatctccttttcttgg

SEQ ID NO: 12483 - DNA, 20 bp, Homo sapiens
ctccttttcttggaggagtc

SEQ ID NO: 12484 - DNA, 20 bp, Homo sapiens
tccttttcttggaggagtca

SEQ ID NO: 12485 - DNA, 20 bp, Homo sapiens
agcctcccacaagaagctgg

SEQ ID NO: 12486 - DNA, 20 bp, Homo sapiens
cccagcctcccacaagaagc

SEQ ID NO: 12487 - DNA, 20 bp, Homo sapiens
tctgctccaccagcttcttg

SEQ ID NO: 12488 - DNA, 20 bp, Homo sapiens
ctgctccaccagcttcttgt

SEQ ID NO: 12489 - DNA, 20 bp, Homo sapiens
ctccaccagcttcttgtggg

SEQ ID NO: 12490 - DNA, 20 bp, Homo sapiens
accagcttcttgtgggaggc

SEQ ID NO: 12491 - DNA, 20 bp, Homo sapiens
ccagcttcttgtgggaggct

SEQ ID NO: 12492 - DNA, 20 bp, Homo sapiens
tgggaggctgggtattatct

SEQ ID NO: 12493 - DNA, 20 bp, Homo sapiens
acagcaggatgactgcgggc

SEQ ID NO: 12494 - DNA, 20 bp, Homo sapiens
cagcacagcaggatgactgc

SEQ ID NO: 12495 - DNA, 20 bp, Homo sapiens
acagcacagcaggatgactg

SEQ ID NO: 12496 - DNA, 20 bp, Homo sapiens
ccattgaagcacagcacagc

SEQ ID NO: 12497 - DNA, 20 bp, Homo sapiens
cctgctgtgctgtgcttcaa

SEQ ID NO: 12498 - DNA, 20 bp, Homo sapiens
gaggaaaatgcaagaggaca

SEQ ID NO: 12499 - DNA, 20 bp, Homo sapiens
gtacgggaggaaaatgcaag

SEQ ID NO: 12500 - DNA, 20 bp, Homo sapiens
agaggaaccaggagtacggg

SEQ ID NO: 12501 - DNA, 20 bp, Homo sapiens
caaagaggaaccaggagtac

SEQ ID NO: 12502 - DNA, 20 bp, Homo sapiens
gcattttcctcccgtactcc

SEQ ID NO: 12503 - DNA, 20 bp, Homo sapiens
tcaaagaggaaccaggagta

SEQ ID NO: 12504 - DNA, 20 bp, Homo sapiens
acgaacttcaaagaggaacc

SEQ ID NO: 12505 - DNA, 20 bp, Homo sapiens
atctactacgaacttcaaag

SEQ ID NO: 12506 - DNA, 20 bp, Homo sapiens
ttgaagttcgtagtagatag

SEQ ID NO: 12507 - DNA, 20 bp, Homo sapiens
cctcaaaaaaaaaaaaaaaa

SEQ ID NO: 12508 - DNA, 20 bp, Homo sapiens
ttttttttttttttttgagg

SEQ ID NO: 12509 - DNA, 20 bp, Homo sapiens
ggagtctcgctctgtccccc

SEQ ID NO: 12510 - DNA, 20 bp, Homo sapiens
tctcgctctgtcccccaggc

SEQ ID NO: 12511 - DNA, 20 bp, Homo sapiens
gccactgcactccagcctgg

SEQ ID NO: 12512 - DNA, 20 bp, Homo sapiens
cgccactgcactccagcctg

SEQ ID NO: 12513 - DNA, 20 bp, Homo sapiens
acgccactgcactccagcct

SEQ ID NO: 12514 - DNA, 20 bp, Homo sapiens
cacgccactgcactccagcc

SEQ ID NO: 12515 - DNA, 20 bp, Homo sapiens
tcccccaggctggagtgcag

SEQ ID NO: 12516 - DNA, 20 bp, Homo sapiens
ggagtgcagtggcgtgatct

SEQ ID NO: 12517 - DNA, 20 bp, Homo sapiens
tcactgcaatctccgcctcc

SEQ ID NO: 12518 - DNA, 20 bp, Homo sapiens
cactgcaatctccgcctcct

SEQ ID NO: 12519 - DNA, 20 bp, Homo sapiens
aatggtgtgaacccaggagg

SEQ ID NO: 12520 - DNA, 20 bp, Homo sapiens
gagaatggtgtgaacccagg

SEQ ID NO: 12521 - DNA, 20 bp, Homo sapiens
caggagaatggtgtgaaccc

SEQ ID NO: 12522 - DNA, 20 bp, Homo sapiens
gggagggtgaggcaggagaa

SEQ ID NO: 12523 - DNA, 20 bp, Homo sapiens
gctatttgggagggtgaggc

SEQ ID NO: 12524 - DNA, 20 bp, Homo sapiens
cctagctatttgggagggtg

SEQ ID NO: 12525 - DNA, 20 bp, Homo sapiens
gtagtcctagctatttggga

SEQ ID NO: 12526 - DNA, 20 bp, Homo sapiens
tgtagtcctagctatttggg

SEQ ID NO: 12527 - DNA, 20 bp, Homo sapiens
gcctgtagtcctagctattt

SEQ ID NO: 12528 - DNA, 20 bp, Homo sapiens
cgcctgtagtcctagctatt

SEQ ID NO: 12529 - DNA, 20 bp, Homo sapiens
cctcaccctcccaaatagct

SEQ ID NO: 12530 - DNA, 20 bp, Homo sapiens
tcccaaatagctaggactac

SEQ ID NO: 12531 - DNA, 20 bp, Homo sapiens
ttatccgggcgcgtggtgga

SEQ ID NO: 12532 - DNA, 20 bp, Homo sapiens
attatccgggcgcgtggtgg

SEQ ID NO: 12533 - DNA, 20 bp, Homo sapiens
aaaattatccgggcgcgtgg

SEQ ID NO: 12534 - DNA, 20 bp, Homo sapiens
ggcgccctccaccacgcgcc

SEQ ID NO: 12535 - DNA, 20 bp, Homo sapiens
caaaaaattatccgggcgcg

SEQ ID NO: 12536 - DNA, 20 bp, Homo sapiens
aaaaatacaaaaaattatcc

SEQ ID NO: 12537 - DNA, 20 bp, Homo sapiens
taaaaatacaaaaaattatc

SEQ ID NO: 12538 - DNA, 20 bp, Homo sapiens
tttgtatttttagtagagac

SEQ ID NO: 12539 - DNA, 20 bp, Homo sapiens
ttgtatttttagtagagaca

SEQ ID NO: 12540 - DNA, 20 bp, Homo sapiens
ggaggccatcctggctaaca

SEQ ID NO: 12541 - DNA, 20 bp, Homo sapiens
agggtttcaccgtgttagcc

SEQ ID NO: 12542 - DNA, 20 bp, Homo sapiens
tttcaccgtgttagccagga

SEQ ID NO: 12543 - DNA, 20 bp, Homo sapiens
tcaggaggtggaggccatcc

SEQ ID NO: 12544 - DNA, 20 bp, Homo sapiens
atcacaaggtcaggaggtgg

SEQ ID NO: 12545 - DNA, 20 bp, Homo sapiens
cggatcacaaggtcaggagg

SEQ ID NO: 12546 - DNA, 20 bp, Homo sapiens
gggcggatcacaaggtcagg

SEQ ID NO: 12547 - DNA, 20 bp, Homo sapiens
ggcgggcggatcacaaggtc

SEQ ID NO: 12548 - DNA, 20 bp, Homo sapiens
gctgaggcgggcggatcaca

SEQ ID NO: 12549 - DNA, 20 bp, Homo sapiens
ctttgggaggctgaggcggg

SEQ ID NO: 12550 - DNA, 20 bp, Homo sapiens
gcactttgggaggctgaggc

SEQ ID NO: 12551 - DNA, 20 bp, Homo sapiens
agcactttgggaggctgagg

SEQ ID NO: 12552 - DNA, 20 bp, Homo sapiens
cccagcactttgggaggctg

SEQ ID NO: 12553 - DNA, 20 bp, Homo sapiens
tgtaatcccagcactttggg

SEQ ID NO: 12554 - DNA, 20 bp, Homo sapiens
gcctgtaatcccagcacttt

SEQ ID NO: 12555 - DNA, 20 bp, Homo sapiens
gcctcagcctcccaaagtgc

SEQ ID NO: 12556 - DNA, 20 bp, Homo sapiens
cgcctgtaatcccagcactt

SEQ ID NO: 12557 - DNA, 20 bp, Homo sapiens
cctcagcctcccaaagtgct

SEQ ID NO: 12558 - DNA, 20 bp, Homo sapiens
tcccaaagtgctgggattac

SEQ ID NO: 12559 - DNA, 20 bp, Homo sapiens
actatttcgggcgggcgcgg

SEQ ID NO: 12560 - DNA, 20 bp, Homo sapiens
ttcactatttcgggcgggcg

SEQ ID NO: 12561 - DNA, 20 bp, Homo sapiens
agactttcactatttcgggc

SEQ ID NO: 12562 - DNA, 20 bp, Homo sapiens
aagactttcactatttcggg

SEQ ID NO: 12563 - DNA, 20 bp, Homo sapiens
tttaagactttcactatttc

SEQ ID NO: 12564 - DNA, 20 bp, Homo sapiens
ctttaagactttcactattt

SEQ ID NO: 12565 - DNA, 20 bp, Homo sapiens
gcagccgaagcagaaagaga

SEQ ID NO: 12566 - DNA, 20 bp, Homo sapiens
gctgccttctctttctgctt

SEQ ID NO: 12567 - DNA, 20 bp, Homo sapiens
ttctgcttcggctgcctaaa

SEQ ID NO: 12568 - DNA, 20 bp, Homo sapiens
tctgcttcggctgcctaaaa

SEQ ID NO: 12569 - DNA, 20 bp, Homo sapiens
acagggggcccttccctttt

SEQ ID NO: 12570 - DNA, 20 bp, Homo sapiens
cttcggctgcctaaaaggga

SEQ ID NO: 12571 - DNA, 20 bp, Homo sapiens
ttcggctgcctaaaagggaa

SEQ ID NO: 12572 - DNA, 20 bp, Homo sapiens
tcacgtgatcatgggacagg

SEQ ID NO: 12573 - DNA, 20 bp, Homo sapiens
gtcacgtgatcatgggacag

SEQ ID NO: 12574 - DNA, 20 bp, Homo sapiens
agtcacgtgatcatgggaca

SEQ ID NO: 12575 - DNA, 20 bp, Homo sapiens
aagtcacgtgatcatgggac

SEQ ID NO: 12576 - DNA, 20 bp, Homo sapiens
caagcaagtcacgtgatcat

SEQ ID NO: 12577 - DNA, 20 bp, Homo sapiens
tcaagcaagtcacgtgatca

SEQ ID NO: 12578 - DNA, 20 bp, Homo sapiens
agtcgtccaaatgactgata

SEQ ID NO: 12579 - DNA, 20 bp, Homo sapiens
gcttgaccttatcagtcatt

SEQ ID NO: 12580 - DNA, 20 bp, Homo sapiens
aagggggggcaggataagga

SEQ ID NO: 12581 - DNA, 20 bp, Homo sapiens
caagggggggcaggataagg

SEQ ID NO: 12582 - DNA, 20 bp, Homo sapiens
agacaagggggggcaggata

SEQ ID NO: 12583 - DNA, 20 bp, Homo sapiens
tatacaagacaagggggggc

SEQ ID NO: 12584 - DNA, 20 bp, Homo sapiens
attgtatacaagacaagggg

SEQ ID NO: 12585 - DNA, 20 bp, Homo sapiens
tattgtatacaagacaaggg

SEQ ID NO: 12586 - DNA, 20 bp, Homo sapiens
ttattgtatacaagacaagg

SEQ ID NO: 12587 - DNA, 20 bp, Homo sapiens
tttattgtatacaagacaag

SEQ ID NO: 12588 - DNA, 20 bp, Homo sapiens
atttattgtatacaagacaa

SEQ ID NO: 12589 - DNA, 20 bp, Homo sapiens
tatttattgtatacaagaca

SEQ ID NO: 12590 - DNA, 20 bp, Homo sapiens
ggtagtggccccgaatggct

SEQ ID NO: 12591 - DNA, 20 bp, Homo sapiens
tatcagcgcgcccagccatt

SEQ ID NO: 12592 - DNA, 20 bp, Homo sapiens
cggtagtggccccgaatggc

SEQ ID NO: 12593 - DNA, 20 bp, Homo sapiens
atcagcgcgcccagccattc

SEQ ID NO: 12594 - DNA, 20 bp, Homo sapiens
tcagcgcgcccagccattcg

SEQ ID NO: 12595 - DNA, 20 bp, Homo sapiens
agaccggtagtggccccgaa

SEQ ID NO: 12596 - DNA, 20 bp, Homo sapiens
cagccattcggggccactac

SEQ ID NO: 12597 - DNA, 20 bp, Homo sapiens
caagacgcagagaccggtag

SEQ ID NO: 12598 - DNA, 20 bp, Homo sapiens
taccatcaagacgcagagac

SEQ ID NO: 12599 - DNA, 20 bp, Homo sapiens
taccggtctctgcgtcttga

SEQ ID NO: 12600 - DNA, 20 bp, Homo sapiens
tctctgcgtcttgatggtag

SEQ ID NO: 12601 - DNA, 20 bp, Homo sapiens
tcttgatggtagtggtcccc

SEQ ID NO: 12602 - DNA, 20 bp, Homo sapiens
cttgatggtagtggtccccc

SEQ ID NO: 12603 - DNA, 20 bp, Homo sapiens
gagaaaacagctgggcccgg

SEQ ID NO: 12604 - DNA, 20 bp, Homo sapiens
agagaaaacagctgggcccg

SEQ ID NO: 12605 - DNA, 20 bp, Homo sapiens
aagagaaaacagctgggccc

SEQ ID NO: 12606 - DNA, 20 bp, Homo sapiens
aaagagaaaacagctgggcc

SEQ ID NO: 12607 - DNA, 20 bp, Homo sapiens
gagataaagagaaaacagct

SEQ ID NO: 12608 - DNA, 20 bp, Homo sapiens
agagataaagagaaaacagc

SEQ ID NO: 12609 - DNA, 20 bp, Homo sapiens
tgttcttcccctgtgaggag

SEQ ID NO: 12610 - DNA, 20 bp, Homo sapiens
acaatctctcctctcctcac

SEQ ID NO: 12611 - DNA, 20 bp, Homo sapiens
caatctctcctctcctcaca

SEQ ID NO: 12612 - DNA, 20 bp, Homo sapiens
aatctctcctctcctcacag

SEQ ID NO: 12613 - DNA, 20 bp, Homo sapiens
gtgggtgttcttcccctgtg

SEQ ID NO: 12614 - DNA, 20 bp, Homo sapiens
ccctacggggctttgcgggt

SEQ ID NO: 12615 - DNA, 20 bp, Homo sapiens
gccctacggggctttgcggg

SEQ ID NO: 12616 - DNA, 20 bp, Homo sapiens
ccagccctacggggctttgc

SEQ ID NO: 12617 - DNA, 20 bp, Homo sapiens
tccagccctacggggctttg

SEQ ID NO: 12618 - DNA, 20 bp, Homo sapiens
acccacccgcaaagccccgt

SEQ ID NO: 12619 - DNA, 20 bp, Homo sapiens
cccacccgcaaagccccgta

SEQ ID NO: 12620 - DNA, 20 bp, Homo sapiens
acgtagggtccagccctacg

SEQ ID NO: 12621 - DNA, 20 bp, Homo sapiens
aacgtagggtccagccctac

SEQ ID NO: 12622 - DNA, 20 bp, Homo sapiens
cccgcaaagccccgtagggc

SEQ ID NO: 12623 - DNA, 20 bp, Homo sapiens
taacgtagggtccagcccta

SEQ ID NO: 12624 - DNA, 20 bp, Homo sapiens
gagcagggcaggctaacgta

SEQ ID NO: 12625 - DNA, 20 bp, Homo sapiens
cgagcagggcaggctaacgt

SEQ ID NO: 12626 - DNA, 20 bp, Homo sapiens
tcgccaaccccgagcagggc

SEQ ID NO: 12627 - DNA, 20 bp, Homo sapiens
ctacgttagcctgccctgct

SEQ ID NO: 12628 - DNA, 20 bp, Homo sapiens
tacgttagcctgccctgctc

SEQ ID NO: 12629 - DNA, 20 bp, Homo sapiens
acgttagcctgccctgctcg

SEQ ID NO: 12630 - DNA, 20 bp, Homo sapiens
agcatcgccaaccccgagca

SEQ ID NO: 12631 - DNA, 20 bp, Homo sapiens
cagcatcgccaaccccgagc

SEQ ID NO: 12632 - DNA, 20 bp, Homo sapiens
tagcctgccctgctcggggt

SEQ ID NO: 12633 - DNA, 20 bp, Homo sapiens
ctgctcggggttggcgatgc

SEQ ID NO: 12634 - DNA, 20 bp, Homo sapiens
ctcggggttggcgatgctgg

SEQ ID NO: 12635 - DNA, 20 bp, Homo sapiens
ggggttggcgatgctggagg

SEQ ID NO: 12636 - DNA, 20 bp, Homo sapiens
gggttggcgatgctggaggt

SEQ ID NO: 12637 - DNA, 20 bp, Homo sapiens
gcgatgctggaggtgggcct

SEQ ID NO: 12638 - DNA, 20 bp, Homo sapiens
aaagcattttctctggtcca

SEQ ID NO: 12639 - DNA, 20 bp, Homo sapiens
cctaattaaagcattttctc

SEQ ID NO: 12640 - DNA, 20 bp, Homo sapiens
ccagagaaaatgctttaatt

SEQ ID NO: 12641 - DNA, 20 bp, Homo sapiens
tgctttaattaggtgacaag

SEQ ID NO: 12642 - DNA, 20 bp, Homo sapiens
gctttaattaggtgacaagc

SEQ ID NO: 12643 - DNA, 20 bp, Homo sapiens
attaggtgacaagcgggcag

SEQ ID NO: 12644 - DNA, 20 bp, Homo sapiens
gctgccggcgccagagacaa

SEQ ID NO: 12645 - DNA, 20 bp, Homo sapiens
cgggcagaggcctttgtctc

SEQ ID NO: 12646 - DNA, 20 bp, Homo sapiens
gaggcctttgtctctggcgc

SEQ ID NO: 12647 - DNA, 20 bp, Homo sapiens
tcagcgggggccgtggctgc

SEQ ID NO: 12648 - DNA, 20 bp, Homo sapiens
gtctctggcgccggcagcca

SEQ ID NO: 12649 - DNA, 20 bp, Homo sapiens
cacgccgtcagcgggggccg

SEQ ID NO: 12650 - DNA, 20 bp, Homo sapiens
gtttcccacgccgtcagcgg

SEQ ID NO: 12651 - DNA, 20 bp, Homo sapiens
gcagccacggcccccgctga

SEQ ID NO: 12652 - DNA, 20 bp, Homo sapiens
tgtttcccacgccgtcagcg

SEQ ID NO: 12653 - DNA, 20 bp, Homo sapiens
ctgtttcccacgccgtcagc

SEQ ID NO: 12654 - DNA, 20 bp, Homo sapiens
tctgtttcccacgccgtcag

SEQ ID NO: 12655 - DNA, 20 bp, Homo sapiens
cacggcccccgctgacggcg

SEQ ID NO: 12656 - DNA, 20 bp, Homo sapiens
acggcccccgctgacggcgt

SEQ ID NO: 12657 - DNA, 20 bp, Homo sapiens
ctggagaccggagtggaaca

SEQ ID NO: 12658 - DNA, 20 bp, Homo sapiens
gctggagaccggagtggaac

SEQ ID NO: 12659 - DNA, 20 bp, Homo sapiens
aaacagaccctgttccactc

SEQ ID NO: 12660 - DNA, 20 bp, Homo sapiens
tccaaggctggagaccggag

SEQ ID NO: 12661 - DNA, 20 bp, Homo sapiens
accattccaaggctggagac

SEQ ID NO: 12662 - DNA, 20 bp, Homo sapiens
tccactccggtctccagcct

SEQ ID NO: 12663 - DNA, 20 bp, Homo sapiens
gaaggcaaccattccaaggc

SEQ ID NO: 12664 - DNA, 20 bp, Homo sapiens
tccggtctccagccttggaa

SEQ ID NO: 12665 - DNA, 20 bp, Homo sapiens
gcacgaaggcaaccattcca

SEQ ID NO: 12666 - DNA, 20 bp, Homo sapiens
tccagacctgcactgcacga

SEQ ID NO: 12667 - DNA, 20 bp, Homo sapiens
tggttgccttcgtgcagtgc

SEQ ID NO: 12668 - DNA, 20 bp, Homo sapiens
gccttcgtgcagtgcaggtc

SEQ ID NO: 12669 - DNA, 20 bp, Homo sapiens
aggtctggaaagtagcagtt

SEQ ID NO: 12670 - DNA, 20 bp, Homo sapiens
tggaaagtagcagtttggca

SEQ ID NO: 12671 - DNA, 20 bp, Homo sapiens
ggaaagtagcagtttggcac

SEQ ID NO: 12672 - DNA, 20 bp, Homo sapiens
actccttttggggaattcta

SEQ ID NO: 12673 - DNA, 20 bp, Homo sapiens
cactccttttggggaattct

SEQ ID NO: 12674 - DNA, 20 bp, Homo sapiens
ggaccctagaattccccaaa

SEQ ID NO: 12675 - DNA, 20 bp, Homo sapiens
gcccctagtcactccttttg

SEQ ID NO: 12676 - DNA, 20 bp, Homo sapiens
agcccctagtcactcctttt

SEQ ID NO: 12677 - DNA, 20 bp, Homo sapiens
cagcccctagtcactccttt

SEQ ID NO: 12678 - DNA, 20 bp, Homo sapiens
attccccaaaaggagtgact

SEQ ID NO: 12679 - DNA, 20 bp, Homo sapiens
ttccccaaaaggagtgacta

SEQ ID NO: 12680 - DNA, 20 bp, Homo sapiens
tccccaaaaggagtgactag

SEQ ID NO: 12681 - DNA, 20 bp, Homo sapiens
caaaaggagtgactaggggc

SEQ ID NO: 12682 - DNA, 20 bp, Homo sapiens
aaaaggagtgactaggggct

SEQ ID NO: 12683 - DNA, 20 bp, Homo sapiens
gtgactaggggctgggattc

SEQ ID NO: 12684 - DNA, 20 bp, Homo sapiens
gggattctggaatttgagtg

SEQ ID NO: 12685 - DNA, 20 bp, Homo sapiens
ttctggaatttgagtgtgga

SEQ ID NO: 12686 - DNA, 20 bp, Homo sapiens
gaatttgagtgtggacggtg

SEQ ID NO: 12687 - DNA, 20 bp, Homo sapiens
tttgagtgtggacggtgagg

SEQ ID NO: 12688 - DNA, 20 bp, Homo sapiens
ttgagtgtggacggtgaggc

SEQ ID NO: 12689 - DNA, 20 bp, Homo sapiens
tgagtgtggacggtgaggcg

SEQ ID NO: 12690 - DNA, 20 bp, Homo sapiens
gagtgtggacggtgaggcgg

SEQ ID NO: 12691 - DNA, 20 bp, Homo sapiens
agtgtggacggtgaggcggg

SEQ ID NO: 12692 - DNA, 20 bp, Homo sapiens
ggacggtgaggcggggggtg

SEQ ID NO: 12693 - DNA, 20 bp, Homo sapiens
gacggtgaggcggggggtgt

SEQ ID NO: 12694 - DNA, 20 bp, Homo sapiens
aggcggggggtgtgggagat

SEQ ID NO: 12695 - DNA, 20 bp, Homo sapiens
gtgtgggagatcggagaccc

SEQ ID NO: 12696 - DNA, 20 bp, Homo sapiens
tgggagatcggagaccctgg

SEQ ID NO: 12697 - DNA, 20 bp, Homo sapiens
gggagatcggagaccctggt

SEQ ID NO: 12698 - DNA, 20 bp, Homo sapiens
aggtgctcccgcgcccacca

SEQ ID NO: 12699 - DNA, 20 bp, Homo sapiens
caggtgctcccgcgcccacc

SEQ ID NO: 12700 - DNA, 20 bp, Homo sapiens
atcggagaccctggtgggcg

SEQ ID NO: 12701 - DNA, 20 bp, Homo sapiens
tcggagaccctggtgggcgc

SEQ ID NO: 12702 - DNA, 20 bp, Homo sapiens
gtgggcgcgggagcacctgc

SEQ ID NO: 12703 - DNA, 20 bp, Homo sapiens
gcgcgggagcacctgcaggc

SEQ ID NO: 12704 - DNA, 20 bp, Homo sapiens
cgcgagggcctccagcctgc

SEQ ID NO: 12705 - DNA, 20 bp, Homo sapiens
cgggagcacctgcaggctgg

SEQ ID NO: 12706 - DNA, 20 bp, Homo sapiens
gctgccgccggagcgcgcga

SEQ ID NO: 12707 - DNA, 20 bp, Homo sapiens
ggctgccgccggagcgcgcg

SEQ ID NO: 12708 - DNA, 20 bp, Homo sapiens
ctggaggccctcgcgcgctc

SEQ ID NO: 12709 - DNA, 20 bp, Homo sapiens
gaggccctcgcgcgctccgg

SEQ ID NO: 12710 - DNA, 20 bp, Homo sapiens
cctgtttgccaggctgccgc

SEQ ID NO: 12711 - DNA, 20 bp, Homo sapiens
cgcgcgctccggcggcagcc

SEQ ID NO: 12712 - DNA, 20 bp, Homo sapiens
ggatggagaacctgtttgcc

SEQ ID NO: 12713 - DNA, 20 bp, Homo sapiens
ccggcggcagcctggcaaac

SEQ ID NO: 12714 - DNA, 20 bp, Homo sapiens
aaacaggttctccatccccc

SEQ ID NO: 12715 - DNA, 20 bp, Homo sapiens
tgccgcgtcctcctggggga

SEQ ID NO: 12716 - DNA, 20 bp, Homo sapiens
caggttctccatcccccagg

SEQ ID NO: 12717 - DNA, 20 bp, Homo sapiens
cctctgccgcgtcctcctgg

SEQ ID NO: 12718 - DNA, 20 bp, Homo sapiens
ccctctgccgcgtcctcctg

SEQ ID NO: 12719 - DNA, 20 bp, Homo sapiens
gccctctgccgcgtcctcct

SEQ ID NO: 12720 - DNA, 20 bp, Homo sapiens
cgccctctgccgcgtcctcc

SEQ ID NO: 12721 - DNA, 20 bp, Homo sapiens
ctccatcccccaggaggacg

SEQ ID NO: 12722 - DNA, 20 bp, Homo sapiens
cccccaggaggacgcggcag

SEQ ID NO: 12723 - DNA, 20 bp, Homo sapiens
ccccaggaggacgcggcaga

SEQ ID NO: 12724 - DNA, 20 bp, Homo sapiens
caggaggacgcggcagaggg

SEQ ID NO: 12725 - DNA, 20 bp, Homo sapiens
cggacgatcgctccactcgc

SEQ ID NO: 12726 - DNA, 20 bp, Homo sapiens
ggacgatcgctccactcgcc

SEQ ID NO: 12727 - DNA, 20 bp, Homo sapiens
ccgcacctggtcccggcgag

SEQ ID NO: 12728 - DNA, 20 bp, Homo sapiens
tcgctccactcgccgggacc

SEQ ID NO: 12729 - DNA, 20 bp, Homo sapiens
agggcccccgcacctggtcc

SEQ ID NO: 12730 - DNA, 20 bp, Homo sapiens
ccactcgccgggaccaggtg

SEQ ID NO: 12731 - DNA, 20 bp, Homo sapiens
cactcgccgggaccaggtgc

SEQ ID NO: 12732 - DNA, 20 bp, Homo sapiens
actcgccgggaccaggtgcg

SEQ ID NO: 12733 - DNA, 20 bp, Homo sapiens
ctgggcagggcccccgcacc

SEQ ID NO: 12734 - DNA, 20 bp, Homo sapiens
ctcgccgggaccaggtgcgg

SEQ ID NO: 12735 - DNA, 20 bp, Homo sapiens
cacgccccagcggctgggca

SEQ ID NO: 12736 - DNA, 20 bp, Homo sapiens
ccacgccccagcggctgggc

SEQ ID NO: 12737 - DNA, 20 bp, Homo sapiens
cgggggccctgcccagccgc

SEQ ID NO: 12738 - DNA, 20 bp, Homo sapiens
ctggccacgccccagcggct

SEQ ID NO: 12739 - DNA, 20 bp, Homo sapiens
gggggccctgcccagccgct

SEQ ID NO: 12740 - DNA, 20 bp, Homo sapiens
cctggccacgccccagcggc

SEQ ID NO: 12741 - DNA, 20 bp, Homo sapiens
ggggccctgcccagccgctg

SEQ ID NO: 12742 - DNA, 20 bp, Homo sapiens
cgagcctggccacgccccag

SEQ ID NO: 12743 - DNA, 20 bp, Homo sapiens
cctgcccagccgctggggcg

SEQ ID NO: 12744 - DNA, 20 bp, Homo sapiens
ccagccgctggggcgtggcc

SEQ ID NO: 12745 - DNA, 20 bp, Homo sapiens
acacctgggtgcttcgagcc

SEQ ID NO: 12746 - DNA, 20 bp, Homo sapiens
tggccaggctcgaagcaccc

SEQ ID NO: 12747 - DNA, 20 bp, Homo sapiens
ggctcgaagcacccaggtgt

SEQ ID NO: 12748 - DNA, 20 bp, Homo sapiens
agagtcggcccccgacacct

SEQ ID NO: 12749 - DNA, 20 bp, Homo sapiens
gctcgaagcacccaggtgtc

SEQ ID NO: 12750 - DNA, 20 bp, Homo sapiens
tagagtcggcccccgacacc

SEQ ID NO: 12751 - DNA, 20 bp, Homo sapiens
ctcgaagcacccaggtgtcg

SEQ ID NO: 12752 - DNA, 20 bp, Homo sapiens
tcgaagcacccaggtgtcgg

SEQ ID NO: 12753 - DNA, 20 bp, Homo sapiens
ccggtgccagggcttagagt

SEQ ID NO: 12754 - DNA, 20 bp, Homo sapiens
cgggggccgactctaagccc

SEQ ID NO: 12755 - DNA, 20 bp, Homo sapiens
ccgactctaagccctggcac

SEQ ID NO: 12756 - DNA, 20 bp, Homo sapiens
ccctctctcttccggtgcca

SEQ ID NO: 12757 - DNA, 20 bp, Homo sapiens
gccctctctcttccggtgcc

SEQ ID NO: 12758 - DNA, 20 bp, Homo sapiens
atccgccgccctctctcttc

SEQ ID NO: 12759 - DNA, 20 bp, Homo sapiens
gccctggcaccggaagagag

SEQ ID NO: 12760 - DNA, 20 bp, Homo sapiens
ccctggcaccggaagagaga

SEQ ID NO: 12761 - DNA, 20 bp, Homo sapiens
tggcaccggaagagagaggg

SEQ ID NO: 12762 - DNA, 20 bp, Homo sapiens
caccggaagagagagggcgg

SEQ ID NO: 12763 - DNA, 20 bp, Homo sapiens
gaagagagagggcggcggat

SEQ ID NO: 12764 - DNA, 20 bp, Homo sapiens
gggcggcggattggacctcc

SEQ ID NO: 12765 - DNA, 20 bp, Homo sapiens
gttgcaatgctggagccggg

SEQ ID NO: 12766 - DNA, 20 bp, Homo sapiens
ccagttgcaatgctggagcc

SEQ ID NO: 12767 - DNA, 20 bp, Homo sapiens
cccagttgcaatgctggagc

SEQ ID NO: 12768 - DNA, 20 bp, Homo sapiens
ggagcgcccagttgcaatgc

SEQ ID NO: 12769 - DNA, 20 bp, Homo sapiens
cccggctccagcattgcaac

SEQ ID NO: 12770 - DNA, 20 bp, Homo sapiens
ccggctccagcattgcaact

SEQ ID NO: 12771 - DNA, 20 bp, Homo sapiens
caactgggcgctccgtctcc

SEQ ID NO: 12772 - DNA, 20 bp, Homo sapiens
tcattgcgtggaccaggaga

SEQ ID NO: 12773 - DNA, 20 bp, Homo sapiens
gcagcatcattgcgtggacc

SEQ ID NO: 12774 - DNA, 20 bp, Homo sapiens
gcagccgcagcatcattgcg

SEQ ID NO: 12775 - DNA, 20 bp, Homo sapiens
tggtccacgcaatgatgctg

SEQ ID NO: 12776 - DNA, 20 bp, Homo sapiens
gctgcggctgctcagaagcc

SEQ ID NO: 12777 - DNA, 20 bp, Homo sapiens
ttcacccagggcaggctacc

SEQ ID NO: 12778 - DNA, 20 bp, Homo sapiens
agaagccaggtagcctgccc

SEQ ID NO: 12779 - DNA, 20 bp, Homo sapiens
gaagccaggtagcctgccct

SEQ ID NO: 12780 - DNA, 20 bp, Homo sapiens
gcgaaggcttcacccagggc

SEQ ID NO: 12781 - DNA, 20 bp, Homo sapiens
ctgcgcgaaggcttcaccca

SEQ ID NO: 12782 - DNA, 20 bp, Homo sapiens
cctgcgcgaaggcttcaccc

SEQ ID NO: 12783 - DNA, 20 bp, Homo sapiens
cctgggtgaagccttcgcgc

SEQ ID NO: 12784 - DNA, 20 bp, Homo sapiens
cccgtcattgacctgcgcga

SEQ ID NO: 12785 - DNA, 20 bp, Homo sapiens
gccttcgcgcaggtcaatga

SEQ ID NO: 12786 - DNA, 20 bp, Homo sapiens
ccttcgcgcaggtcaatgac

SEQ ID NO: 12787 - DNA, 20 bp, Homo sapiens
cttcgcgcaggtcaatgacg

SEQ ID NO: 12788 - DNA, 20 bp, Homo sapiens
cgcgcaggtcaatgacgggg

SEQ ID NO: 12789 - DNA, 20 bp, Homo sapiens
gcaggtcaatgacggggcgg

SEQ ID NO: 12790 - DNA, 20 bp, Homo sapiens
caggtcaatgacggggcgga

SEQ ID NO: 12791 - DNA, 20 bp, Homo sapiens
aggtcaatgacggggcggag

SEQ ID NO: 12792 - DNA, 20 bp, Homo sapiens
caatgacggggcggaggggc

SEQ ID NO: 12793 - DNA, 20 bp, Homo sapiens
aatgacggggcggaggggca

SEQ ID NO: 12794 - DNA, 20 bp, Homo sapiens
cggggcggaggggcagggcg

SEQ ID NO: 12795 - DNA, 20 bp, Homo sapiens
tccccagatcggggatgcag

SEQ ID NO: 12796 - DNA, 20 bp, Homo sapiens
ctccccagatcggggatgca

SEQ ID NO: 12797 - DNA, 20 bp, Homo sapiens
gctccccagatcggggatgc

SEQ ID NO: 12798 - DNA, 20 bp, Homo sapiens
ggtcccctgcatccccgatc

SEQ ID NO: 12799 - DNA, 20 bp, Homo sapiens
gtcccctgcatccccgatct

SEQ ID NO: 12800 - DNA, 20 bp, Homo sapiens
gcccaccgctccccagatcg

SEQ ID NO: 12801 - DNA, 20 bp, Homo sapiens
tcccctgcatccccgatctg

SEQ ID NO: 12802 - DNA, 20 bp, Homo sapiens
ggcccaccgctccccagatc

SEQ ID NO: 12803 - DNA, 20 bp, Homo sapiens
gggcccaccgctccccagat

SEQ ID NO: 12804 - DNA, 20 bp, Homo sapiens
tgcatccccgatctggggag

SEQ ID NO: 12805 - DNA, 20 bp, Homo sapiens
atccccgatctggggagcgg

SEQ ID NO: 12806 - DNA, 20 bp, Homo sapiens
tccccgatctggggagcggt

SEQ ID NO: 12807 - DNA, 20 bp, Homo sapiens
atctggggagcggtgggccc

SEQ ID NO: 12808 - DNA, 20 bp, Homo sapiens
tctggggagcggtgggccca

SEQ ID NO: 12809 - DNA, 20 bp, Homo sapiens
ctggggagcggtgggcccag

SEQ ID NO: 12810 - DNA, 20 bp, Homo sapiens
gggctaaggcgatggcccct

SEQ ID NO: 12811 - DNA, 20 bp, Homo sapiens
ggggctaaggcgatggcccc

SEQ ID NO: 12812 - DNA, 20 bp, Homo sapiens
agcgccaggggctaaggcga

SEQ ID NO: 12813 - DNA, 20 bp, Homo sapiens
agccccagcgccaggggcta

SEQ ID NO: 12814 - DNA, 20 bp, Homo sapiens
ggggccatcgccttagcccc

SEQ ID NO: 12815 - DNA, 20 bp, Homo sapiens
gcgccgagccccagcgccag

SEQ ID NO: 12816 - DNA, 20 bp, Homo sapiens
atcgccttagcccctggcgc

SEQ ID NO: 12817 - DNA, 20 bp, Homo sapiens
ggcgccgagccccagcgcca

SEQ ID NO: 12818 - DNA, 20 bp, Homo sapiens
tcgccttagcccctggcgct

SEQ ID NO: 12819 - DNA, 20 bp, Homo sapiens
tggcgccgagccccagcgcc

SEQ ID NO: 12820 - DNA, 20 bp, Homo sapiens
cgccttagcccctggcgctg

SEQ ID NO: 12821 - DNA, 20 bp, Homo sapiens
tagcccctggcgctggggct

SEQ ID NO: 12822 - DNA, 20 bp, Homo sapiens
tggggctcggcgccaagtga

SEQ ID NO: 12823 - DNA, 20 bp, Homo sapiens
ggggctcggcgccaagtgac

SEQ ID NO: 12824 - DNA, 20 bp, Homo sapiens
gtggagccccgcccgtcact

SEQ ID NO: 12825 - DNA, 20 bp, Homo sapiens
gctcggcgccaagtgacggg

SEQ ID NO: 12826 - DNA, 20 bp, Homo sapiens
ctcggcgccaagtgacgggc

SEQ ID NO: 12827 - DNA, 20 bp, Homo sapiens
tcggcgccaagtgacgggcg

SEQ ID NO: 12828 - DNA, 20 bp, Homo sapiens
ccgggcggatggctggaagg

SEQ ID NO: 12829 - DNA, 20 bp, Homo sapiens
gggccgggcggatggctgga

SEQ ID NO: 12830 - DNA, 20 bp, Homo sapiens
tcccgggccgggcggatggc

SEQ ID NO: 12831 - DNA, 20 bp, Homo sapiens
ccaccttccagccatccgcc

SEQ ID NO: 12832 - DNA, 20 bp, Homo sapiens
gccctcccgggccgggcgga

SEQ ID NO: 12833 - DNA, 20 bp, Homo sapiens
gtccgccctcccgggccggg

SEQ ID NO: 12834 - DNA, 20 bp, Homo sapiens
ttccagccatccgcccggcc

SEQ ID NO: 12835 - DNA, 20 bp, Homo sapiens
tccagccatccgcccggccc

SEQ ID NO: 12836 - DNA, 20 bp, Homo sapiens
agcgtccgccctcccgggcc

SEQ ID NO: 12837 - DNA, 20 bp, Homo sapiens
cagcgtccgccctcccgggc

SEQ ID NO: 12838 - DNA, 20 bp, Homo sapiens
agccatccgcccggcccggg

SEQ ID NO: 12839 - DNA, 20 bp, Homo sapiens
gccatccgcccggcccggga

SEQ ID NO: 12840 - DNA, 20 bp, Homo sapiens
ctcgcagcgtccgccctccc

SEQ ID NO: 12841 - DNA, 20 bp, Homo sapiens
atccgcccggcccgggaggg

SEQ ID NO: 12842 - DNA, 20 bp, Homo sapiens
tctcgcagcgtccgccctcc

SEQ ID NO: 12843 - DNA, 20 bp, Homo sapiens
ggcggacgctgcgagactcc

SEQ ID NO: 12844 - DNA, 20 bp, Homo sapiens
aggaaggagagggcgcggcc

SEQ ID NO: 12845 - DNA, 20 bp, Homo sapiens
gaggaaggagagggcgcggc

SEQ ID NO: 12846 - DNA, 20 bp, Homo sapiens
aggagaggaaggagagggcg

SEQ ID NO: 12847 - DNA, 20 bp, Homo sapiens
tggggaggagaggaaggaga

SEQ ID NO: 12848 - DNA, 20 bp, Homo sapiens
ttggggaggagaggaaggag

SEQ ID NO: 12849 - DNA, 20 bp, Homo sapiens
agggcttggggaggagagga

SEQ ID NO: 12850 - DNA, 20 bp, Homo sapiens
agcgagggcttggggaggag

SEQ ID NO: 12851 - DNA, 20 bp, Homo sapiens
ctggcagcgagggcttgggg

SEQ ID NO: 12852 - DNA, 20 bp, Homo sapiens
ggactggcagcgagggcttg

SEQ ID NO: 12853 - DNA, 20 bp, Homo sapiens
cggactggcagcgagggctt

SEQ ID NO: 12854 - DNA, 20 bp, Homo sapiens
ccggactggcagcgagggct

SEQ ID NO: 12855 - DNA, 20 bp, Homo sapiens
cctgtccggactggcagcga

SEQ ID NO: 12856 - DNA, 20 bp, Homo sapiens
gcctgtccggactggcagcg

SEQ ID NO: 12857 - DNA, 20 bp, Homo sapiens
ccaagccctcgctgccagtc

SEQ ID NO: 12858 - DNA, 20 bp, Homo sapiens
tccgcgcagcctgtccggac

SEQ ID NO: 12859 - DNA, 20 bp, Homo sapiens
ccctcgctgccagtccggac

SEQ ID NO: 12860 - DNA, 20 bp, Homo sapiens
tcccctccgcgcagcctgtc

SEQ ID NO: 12861 - DNA, 20 bp, Homo sapiens
gccagtccggacaggctgcg

SEQ ID NO: 12862 - DNA, 20 bp, Homo sapiens
agtccggacaggctgcgcgg

SEQ ID NO: 12863 - DNA, 20 bp, Homo sapiens
gtccggacaggctgcgcgga

SEQ ID NO: 12864 - DNA, 20 bp, Homo sapiens
tccggacaggctgcgcggag

SEQ ID NO: 12865 - DNA, 20 bp, Homo sapiens
ggacaggctgcgcggagggg

SEQ ID NO: 12866 - DNA, 20 bp, Homo sapiens
gacaggctgcgcggagggga

SEQ ID NO: 12867 - DNA, 20 bp, Homo sapiens
tgcgcggaggggagggctgc

SEQ ID NO: 12868 - DNA, 20 bp, Homo sapiens
gcgcggaggggagggctgcc

SEQ ID NO: 12869 - DNA, 20 bp, Homo sapiens
ggaggggagggctgccgggc

SEQ ID NO: 12870 - DNA, 20 bp, Homo sapiens
aggcgtccggctatccggcc

SEQ ID NO: 12871 - DNA, 20 bp, Homo sapiens
gggctgccgggccggatagc

SEQ ID NO: 12872 - DNA, 20 bp, Homo sapiens
acgccaggcgtccggctatc

SEQ ID NO: 12873 - DNA, 20 bp, Homo sapiens
gggccggatagccggacgcc

SEQ ID NO: 12874 - DNA, 20 bp, Homo sapiens
cccctggaacgccaggcgtc

SEQ ID NO: 12875 - DNA, 20 bp, Homo sapiens
ccggccgcccctggaacgcc

SEQ ID NO: 12876 - DNA, 20 bp, Homo sapiens
agccggacgcctggcgttcc

SEQ ID NO: 12877 - DNA, 20 bp, Homo sapiens
gccggacgcctggcgttcca

SEQ ID NO: 12878 - DNA, 20 bp, Homo sapiens
ccggacgcctggcgttccag

SEQ ID NO: 12879 - DNA, 20 bp, Homo sapiens
gacgcctggcgttccagggg

SEQ ID NO: 12880 - DNA, 20 bp, Homo sapiens
aggccacatccggccgcccc

SEQ ID NO: 12881 - DNA, 20 bp, Homo sapiens
cctggcgttccaggggcggc

SEQ ID NO: 12882 - DNA, 20 bp, Homo sapiens
gttccaggggcggccggatg

SEQ ID NO: 12883 - DNA, 20 bp, Homo sapiens
ccgcaaaggcaggccacatc

SEQ ID NO: 12884 - DNA, 20 bp, Homo sapiens
agcgcaccctccgcaaaggc

SEQ ID NO: 12885 - DNA, 20 bp, Homo sapiens
ccggatgtggcctgcctttg

SEQ ID NO: 12886 - DNA, 20 bp, Homo sapiens
gatgtggcctgcctttgcgg

SEQ ID NO: 12887 - DNA, 20 bp, Homo sapiens
ccggagcgcaccctccgcaa

SEQ ID NO: 12888 - DNA, 20 bp, Homo sapiens
atgtggcctgcctttgcgga

SEQ ID NO: 12889 - DNA, 20 bp, Homo sapiens
cctttgcggagggtgcgctc

SEQ ID NO: 12890 - DNA, 20 bp, Homo sapiens
cacagtccgcttttcgtggc

SEQ ID NO: 12891 - DNA, 20 bp, Homo sapiens
gatccacagtccgcttttcg

SEQ ID NO: 12892 - DNA, 20 bp, Homo sapiens
tgcgctccggccacgaaaag

SEQ ID NO: 12893 - DNA, 20 bp, Homo sapiens
cggccacgaaaagcggactg

SEQ ID NO: 12894 - DNA, 20 bp, Homo sapiens
ttacccgagctgcttgcagg

SEQ ID NO: 12895 - DNA, 20 bp, Homo sapiens
cacttacccgagctgcttgc

SEQ ID NO: 12896 - DNA, 20 bp, Homo sapiens
tctgccacctgcaagcagct

SEQ ID NO: 12897 - DNA, 20 bp, Homo sapiens
ctgccacctgcaagcagctc

SEQ ID NO: 12898 - DNA, 20 bp, Homo sapiens
ctgcaagcagctcgggtaag

SEQ ID NO: 12899 - DNA, 20 bp, Homo sapiens
tgcaagcagctcgggtaagt

SEQ ID NO: 12900 - DNA, 20 bp, Homo sapiens
gcaagcagctcgggtaagtg

SEQ ID NO: 12901 - DNA, 20 bp, Homo sapiens
gtcccaggaacaactgagtg

SEQ ID NO: 12902 - DNA, 20 bp, Homo sapiens
ggtcccaggaacaactgagt

SEQ ID NO: 12903 - DNA, 20 bp, Homo sapiens
gggtcccaggaacaactgag

SEQ ID NO: 12904 - DNA, 20 bp, Homo sapiens
ctgccccactcagttgttcc

SEQ ID NO: 12905 - DNA, 20 bp, Homo sapiens
tgccccactcagttgttcct

SEQ ID NO: 12906 - DNA, 20 bp, Homo sapiens
aggagttgttcctgggtccc

SEQ ID NO: 12907 - DNA, 20 bp, Homo sapiens
ctcagttgttcctgggaccc

SEQ ID NO: 12908 - DNA, 20 bp, Homo sapiens
gttctgaaggagttgttcct

SEQ ID NO: 12909 - DNA, 20 bp, Homo sapiens
ggttctgaaggagttgttcc

SEQ ID NO: 12910 - DNA, 20 bp, Homo sapiens
ggtgcacctcctggttctga

SEQ ID NO: 12911 - DNA, 20 bp, Homo sapiens
ggaacaactccttcagaacc

SEQ ID NO: 12912 - DNA, 20 bp, Homo sapiens
acaactccttcagaaccagg

SEQ ID NO: 12913 - DNA, 20 bp, Homo sapiens
gaggttgggggtgcacctcc

SEQ ID NO: 12914 - DNA, 20 bp, Homo sapiens
agacctggagaagaggttgg

SEQ ID NO: 12915 - DNA, 20 bp, Homo sapiens
aagacctggagaagaggttg

SEQ ID NO: 12916 - DNA, 20 bp, Homo sapiens
gaagacctggagaagaggtt

SEQ ID NO: 12917 - DNA, 20 bp, Homo sapiens
ggaagacctggagaagaggt

SEQ ID NO: 12918 - DNA, 20 bp, Homo sapiens
cttaggaagacctggagaag

SEQ ID NO: 12919 - DNA, 20 bp, Homo sapiens
gcacccccaacctcttctcc

SEQ ID NO: 12920 - DNA, 20 bp, Homo sapiens
cctagggccttaggaagacc

SEQ ID NO: 12921 - DNA, 20 bp, Homo sapiens
ctcttctccaggtcttccta

SEQ ID NO: 12922 - DNA, 20 bp, Homo sapiens
gcggagattcctagggcctt

SEQ ID NO: 12923 - DNA, 20 bp, Homo sapiens
ccaggtcttcctaaggccct

SEQ ID NO: 12924 - DNA, 20 bp, Homo sapiens
ggaggtggcggagattccta

SEQ ID NO: 12925 - DNA, 20 bp, Homo sapiens
gggaggtggcggagattcct

SEQ ID NO: 12926 - DNA, 20 bp, Homo sapiens
agtaatggctggggaggtgg

SEQ ID NO: 12927 - DNA, 20 bp, Homo sapiens
aggagtaatggctggggagg

SEQ ID NO: 12928 - DNA, 20 bp, Homo sapiens
tggaggagtaatggctgggg

SEQ ID NO: 12929 - DNA, 20 bp, Homo sapiens
tcctggaggagtaatggctg

SEQ ID NO: 12930 - DNA, 20 bp, Homo sapiens
ttcctggaggagtaatggct

SEQ ID NO: 12931 - DNA, 20 bp, Homo sapiens
gttcctggaggagtaatggc

SEQ ID NO: 12932 - DNA, 20 bp, Homo sapiens
cttggttcctggaggagtaa

SEQ ID NO: 12933 - DNA, 20 bp, Homo sapiens
tccccagccattactcctcc

SEQ ID NO: 12934 - DNA, 20 bp, Homo sapiens
aggagcatcttggttcctgg

SEQ ID NO: 12935 - DNA, 20 bp, Homo sapiens
ggaaggagcatcttggttcc

SEQ ID NO: 12936 - DNA, 20 bp, Homo sapiens
caggagcggaaggagcatct

SEQ ID NO: 12937 - DNA, 20 bp, Homo sapiens
gctggagggtcaggagcgga

SEQ ID NO: 12938 - DNA, 20 bp, Homo sapiens
agaggctggagggtcaggag

SEQ ID NO: 12939 - DNA, 20 bp, Homo sapiens
acaagagaggctggagggtc

SEQ ID NO: 12940 - DNA, 20 bp, Homo sapiens
gtaaaacaagagaggctgga

SEQ ID NO: 12941 - DNA, 20 bp, Homo sapiens
agtaaaacaagagaggctgg

SEQ ID NO: 12942 - DNA, 20 bp, Homo sapiens
tcaagtaaaacaagagaggc

SEQ ID NO: 12943 - DNA, 20 bp, Homo sapiens
tagttcaagtaaaacaagag

SEQ ID NO: 12944 - DNA, 20 bp, Homo sapiens
tccaccacagaggtggtgat

SEQ ID NO: 12945 - DNA, 20 bp, Homo sapiens
atccaccacagaggtggtga

SEQ ID NO: 12946 - DNA, 20 bp, Homo sapiens
gtttcccatcaccacctctg

SEQ ID NO: 12947 - DNA, 20 bp, Homo sapiens
cgcaaaatccaccacagagg

SEQ ID NO: 12948 - DNA, 20 bp, Homo sapiens
tcccatcaccacctctgtgg

SEQ ID NO: 12949 - DNA, 20 bp, Homo sapiens
aggcgcaaaatccaccacag

SEQ ID NO: 12950 - DNA, 20 bp, Homo sapiens
ctcaggagtacctgtctgtg

SEQ ID NO: 12951 - DNA, 20 bp, Homo sapiens
ggattttgcgcctcacagac

SEQ ID NO: 12952 - DNA, 20 bp, Homo sapiens
cttccaccagcctgtttctc

SEQ ID NO: 12953 - DNA, 20 bp, Homo sapiens
gacaggtactcctgagaaac

SEQ ID NO: 12954 - DNA, 20 bp, Homo sapiens
ggtactcctgagaaacaggc

SEQ ID NO: 12955 - DNA, 20 bp, Homo sapiens
actcctgagaaacaggctgg

SEQ ID NO: 12956 - DNA, 20 bp, Homo sapiens
cctgtaagttccgctgatac

SEQ ID NO: 12957 - DNA, 20 bp, Homo sapiens
gtggaagagtccagtatcag

SEQ ID NO: 12958 - DNA, 20 bp, Homo sapiens
ccagtatcagcggaacttac

SEQ ID NO: 12959 - DNA, 20 bp, Homo sapiens
gtatcagcggaacttacagg

SEQ ID NO: 12960 - DNA, 20 bp, Homo sapiens
tatcagcggaacttacagga

SEQ ID NO: 12961 - DNA, 20 bp, Homo sapiens
atcagcggaacttacaggag

SEQ ID NO: 12962 - DNA, 20 bp, Homo sapiens
gggagactcgagattccttc

SEQ ID NO: 12963 - DNA, 20 bp, Homo sapiens
ggttcctacacctttcctga

SEQ ID NO: 12964 - DNA, 20 bp, Homo sapiens
actcgagattccttcaggaa

SEQ ID NO: 12965 - DNA, 20 bp, Homo sapiens
gattccttcaggaaaggtgt

SEQ ID NO: 12966 - DNA, 20 bp, Homo sapiens
tcaggaaaggtgtaggaacc

SEQ ID NO: 12967 - DNA, 20 bp, Homo sapiens
aaaaaaaaagaaagtggtcc

SEQ ID NO: 12968 - DNA, 20 bp, Homo sapiens
tttttttttttttttaagac

SEQ ID NO: 12969 - DNA, 20 bp, Homo sapiens
ttttttttttttttaagaca

SEQ ID NO: 12970 - DNA, 20 bp, Homo sapiens
tccagcttgcgcgacagaga

SEQ ID NO: 12971 - DNA, 20 bp, Homo sapiens
ctccagcttgcgcgacagag

SEQ ID NO: 12972 - DNA, 20 bp, Homo sapiens
tccctctctgtcgcgcaagc

SEQ ID NO: 12973 - DNA, 20 bp, Homo sapiens
gcaagctggagtgcagtcag

SEQ ID NO: 12974 - DNA, 20 bp, Homo sapiens
tgcagtcagcggtgctatcg

SEQ ID NO: 12975 - DNA, 20 bp, Homo sapiens
tcgcggctcattgtgagctc

SEQ ID NO: 12976 - DNA, 20 bp, Homo sapiens
cgcggctcattgtgagctcc

SEQ ID NO: 12977 - DNA, 20 bp, Homo sapiens
gcggctcattgtgagctccg

SEQ ID NO: 12978 - DNA, 20 bp, Homo sapiens
tgctaaggcgggaggatccc

SEQ ID NO: 12979 - DNA, 20 bp, Homo sapiens
acaccggatgctaaggcggg

SEQ ID NO: 12980 - DNA, 20 bp, Homo sapiens
gctacaccggatgctaaggc

SEQ ID NO: 12981 - DNA, 20 bp, Homo sapiens
agctacaccggatgctaagg

SEQ ID NO: 12982 - DNA, 20 bp, Homo sapiens
ctcagctacaccggatgcta

SEQ ID NO: 12983 - DNA, 20 bp, Homo sapiens
gatcctcccgccttagcatc

SEQ ID NO: 12984 - DNA, 20 bp, Homo sapiens
gtctgtggtctcagctacac

SEQ ID NO: 12985 - DNA, 20 bp, Homo sapiens
ggcatggtggcacatgtctg

SEQ ID NO: 12986 - DNA, 20 bp, Homo sapiens
ataaaattagcttggcatgg

SEQ ID NO: 12987 - DNA, 20 bp, Homo sapiens
taaataaaattagcttggca

SEQ ID NO: 12988 - DNA, 20 bp, Homo sapiens
aaaaataaataaaattagct

SEQ ID NO: 12989 - DNA, 20 bp, Homo sapiens
taattttatttatttttttt

SEQ ID NO: 12990 - DNA, 20 bp, Homo sapiens
tatttatttttttttggaga

SEQ ID NO: 12991 - DNA, 20 bp, Homo sapiens
gagtttcactcttgttgccc

SEQ ID NO: 12992 - DNA, 20 bp, Homo sapiens
ttcactcttgttgcccaggc

SEQ ID NO: 12993 - DNA, 20 bp, Homo sapiens
atgccattacactccagcct

SEQ ID NO: 12994 - DNA, 20 bp, Homo sapiens
catgccattacactccagcc

SEQ ID NO: 12995 - DNA, 20 bp, Homo sapiens
ttgcccaggctggagtgtaa

SEQ ID NO: 12996 - DNA, 20 bp, Homo sapiens
aacccggggggcgggagttg

SEQ ID NO: 12997 - DNA, 20 bp, Homo sapiens
tcaccgcaactcccgccccc

SEQ ID NO: 12998 - DNA, 20 bp, Homo sapiens
atcgcctgaacccggggggc

SEQ ID NO: 12999 - DNA, 20 bp, Homo sapiens
caccgcaactcccgcccccc

SEQ ID NO: 13000 - DNA, 20 bp, Homo sapiens
aatcgcctgaacccgggggg

SEQ ID NO: 13001 - DNA, 20 bp, Homo sapiens
gagaatcgcctgaacccggg

SEQ ID NO: 13002 - DNA, 20 bp, Homo sapiens
ggagaatcgcctgaacccgg

SEQ ID NO: 13003 - DNA, 20 bp, Homo sapiens
aggagaatcgcctgaacccg

SEQ ID NO: 13004 - DNA, 20 bp, Homo sapiens
aactcccgccccccgggttc

SEQ ID NO: 13005 - DNA, 20 bp, Homo sapiens
caggagaatcgcctgaaccc

SEQ ID NO: 13006 - DNA, 20 bp, Homo sapiens
gcaggagaatcgcctgaacc

SEQ ID NO: 13007 - DNA, 20 bp, Homo sapiens
gccactcgggaggctgaggc

SEQ ID NO: 13008 - DNA, 20 bp, Homo sapiens
cccagccactcgggaggctg

SEQ ID NO: 13009 - DNA, 20 bp, Homo sapiens
tcctgcctcagcctcccgag

SEQ ID NO: 13010 - DNA, 20 bp, Homo sapiens
tgtaatcccagccactcggg

SEQ ID NO: 13011 - DNA, 20 bp, Homo sapiens
gcctgtaatcccagccactc

SEQ ID NO: 13012 - DNA, 20 bp, Homo sapiens
gcctcagcctcccgagtggc

SEQ ID NO: 13013 - DNA, 20 bp, Homo sapiens
tgcctgtaatcccagccact

SEQ ID NO: 13014 - DNA, 20 bp, Homo sapiens
cctcagcctcccgagtggct

SEQ ID NO: 13015 - DNA, 20 bp, Homo sapiens
tcccgagtggctgggattac

SEQ ID NO: 13016 - DNA, 20 bp, Homo sapiens
acaaaattagccgggcatgg

SEQ ID NO: 13017 - DNA, 20 bp, Homo sapiens
caggcatgcgccaccatgcc

SEQ ID NO: 13018 - DNA, 20 bp, Homo sapiens
aatacaaaattagccgggca

SEQ ID NO: 13019 - DNA, 20 bp, Homo sapiens
cttaaaatacaaaattagcc

SEQ ID NO: 13020 - DNA, 20 bp, Homo sapiens
acttaaaatacaaaattagc

SEQ ID NO: 13021 - DNA, 20 bp, Homo sapiens
tttgtattttaagtagagac

SEQ ID NO: 13022 - DNA, 20 bp, Homo sapiens
ttgtattttaagtagagaca

SEQ ID NO: 13023 - DNA, 20 bp, Homo sapiens
gagacagggtttctccacgt

SEQ ID NO: 13024 - DNA, 20 bp, Homo sapiens
cgagaccagcctgaccaacg

SEQ ID NO: 13025 - DNA, 20 bp, Homo sapiens
agggtttctccacgttggtc

SEQ ID NO: 13026 - DNA, 20 bp, Homo sapiens
tttctccacgttggtcaggc

SEQ ID NO: 13027 - DNA, 20 bp, Homo sapiens
ggtctcgaactcccaacctc

SEQ ID NO: 13028 - DNA, 20 bp, Homo sapiens
tgggtggatcacctgaggtt

SEQ ID NO: 13029 - DNA, 20 bp, Homo sapiens
gtgggtggatcacctgaggt

SEQ ID NO: 13030 - DNA, 20 bp, Homo sapiens
caaggtgggtggatcacctg

SEQ ID NO: 13031 - DNA, 20 bp, Homo sapiens
ctttgggaggccaaggtggg

SEQ ID NO: 13032 - DNA, 20 bp, Homo sapiens
ctcaggtgatccacccacct

SEQ ID NO: 13033 - DNA, 20 bp, Homo sapiens
gcactttgggaggccaaggt

SEQ ID NO: 13034 - DNA, 20 bp, Homo sapiens
agcactttgggaggccaagg

SEQ ID NO: 13035 - DNA, 20 bp, Homo sapiens
cccagcactttgggaggcca

SEQ ID NO: 13036 - DNA, 20 bp, Homo sapiens
tgtaaccccagcactttggg

SEQ ID NO: 13037 - DNA, 20 bp, Homo sapiens
acctgtaaccccagcacttt

SEQ ID NO: 13038 - DNA, 20 bp, Homo sapiens
accttggcctcccaaagtgc

SEQ ID NO: 13039 - DNA, 20 bp, Homo sapiens
cacctgtaaccccagcactt

SEQ ID NO: 13040 - DNA, 20 bp, Homo sapiens
ccttggcctcccaaagtgct

SEQ ID NO: 13041 - DNA, 20 bp, Homo sapiens
cttggcctcccaaagtgctg

SEQ ID NO: 13042 - DNA, 20 bp, Homo sapiens
tcccaaagtgctggggttac

SEQ ID NO: 13043 - DNA, 20 bp, Homo sapiens
ttggcatgggccaggcgcgg

SEQ ID NO: 13044 - DNA, 20 bp, Homo sapiens
caggtgtgagccaccgcgcc

SEQ ID NO: 13045 - DNA, 20 bp, Homo sapiens
agcttggcatgggccaggcg

SEQ ID NO: 13046 - DNA, 20 bp, Homo sapiens
aaattagcttggcatgggcc

SEQ ID NO: 13047 - DNA, 20 bp, Homo sapiens
ttttaaaattagcttggcat

SEQ ID NO: 13048 - DNA, 20 bp, Homo sapiens
attttaaaattagcttggca

SEQ ID NO: 13049 - DNA, 20 bp, Homo sapiens
aaaaaattttaaaattagct

SEQ ID NO: 13050 - DNA, 20 bp, Homo sapiens
gtaagagtgctctgttgccc

SEQ ID NO: 13051 - DNA, 20 bp, Homo sapiens
caggagttcaagatcagcct

SEQ ID NO: 13052 - DNA, 20 bp, Homo sapiens
ccaggagttcaagatcagcc

SEQ ID NO: 13053 - DNA, 20 bp, Homo sapiens
ccaggctgatcttgaactcc

SEQ ID NO: 13054 - DNA, 20 bp, Homo sapiens
caggctgatcttgaactcct

SEQ ID NO: 13055 - DNA, 20 bp, Homo sapiens
tgggaggatcccttgagccc

SEQ ID NO: 13056 - DNA, 20 bp, Homo sapiens
atcttgaactcctgggctca

SEQ ID NO: 13057 - DNA, 20 bp, Homo sapiens
tcttgaactcctgggctcaa

SEQ ID NO: 13058 - DNA, 20 bp, Homo sapiens
tattgggaggctgagatggg

SEQ ID NO: 13059 - DNA, 20 bp, Homo sapiens
gcatattgggaggctgagat

SEQ ID NO: 13060 - DNA, 20 bp, Homo sapiens
agcatattgggaggctgaga

SEQ ID NO: 13061 - DNA, 20 bp, Homo sapiens
tgtaatcccagcatattggg

SEQ ID NO: 13062 - DNA, 20 bp, Homo sapiens
acctgtaatcccagcatatt

SEQ ID NO: 13063 - DNA, 20 bp, Homo sapiens
atctcagcctcccaatatgc

SEQ ID NO: 13064 - DNA, 20 bp, Homo sapiens
cacctgtaatcccagcatat

SEQ ID NO: 13065 - DNA, 20 bp, Homo sapiens
tctcagcctcccaatatgct

SEQ ID NO: 13066 - DNA, 20 bp, Homo sapiens
tcccaatatgctgggattac

SEQ ID NO: 13067 - DNA, 20 bp, Homo sapiens
catggtttggctgggcactg

SEQ ID NO: 13068 - DNA, 20 bp, Homo sapiens
aagatagccatggtttggct

SEQ ID NO: 13069 - DNA, 20 bp, Homo sapiens
caagatagccatggtttggc

SEQ ID NO: 13070 - DNA, 20 bp, Homo sapiens
cacagtgcccagccaaacca

SEQ ID NO: 13071 - DNA, 20 bp, Homo sapiens
ttttcaagatagccatggtt

SEQ ID NO: 13072 - DNA, 20 bp, Homo sapiens
agtggttttcaagatagcca

SEQ ID NO: 13073 - DNA, 20 bp, Homo sapiens
catggggactggaagacaag

SEQ ID NO: 13074 - DNA, 20 bp, Homo sapiens
gaatttcggggcatggggac

SEQ ID NO: 13075 - DNA, 20 bp, Homo sapiens
ccttggaatttcggggcatg

SEQ ID NO: 13076 - DNA, 20 bp, Homo sapiens
gccttggaatttcggggcat

SEQ ID NO: 13077 - DNA, 20 bp, Homo sapiens
agccttggaatttcggggca

SEQ ID NO: 13078 - DNA, 20 bp, Homo sapiens
atgagagccttggaatttcg

SEQ ID NO: 13079 - DNA, 20 bp, Homo sapiens
gatgagagccttggaatttc

SEQ ID NO: 13080 - DNA, 20 bp, Homo sapiens
ggatgagagccttggaattt

SEQ ID NO: 13081 - DNA, 20 bp, Homo sapiens
ccccatgccccgaaattcca

SEQ ID NO: 13082 - DNA, 20 bp, Homo sapiens
ggtttcagggatgagagcct

SEQ ID NO: 13083 - DNA, 20 bp, Homo sapiens
agcctgagtcctaggtttca

SEQ ID NO: 13084 - DNA, 20 bp, Homo sapiens
gagcctgagtcctaggtttc

SEQ ID NO: 13085 - DNA, 20 bp, Homo sapiens
ggctctcatccctgaaacct

SEQ ID NO: 13086 - DNA, 20 bp, Homo sapiens
gtagggagagcctgagtcct

SEQ ID NO: 13087 - DNA, 20 bp, Homo sapiens
atccctgaaacctaggactc

SEQ ID NO: 13088 - DNA, 20 bp, Homo sapiens
agactcctggggctgaggta

SEQ ID NO: 13089 - DNA, 20 bp, Homo sapiens
tagactcctggggctgaggt

SEQ ID NO: 13090 - DNA, 20 bp, Homo sapiens
ggtttagactcctggggctg

SEQ ID NO: 13091 - DNA, 20 bp, Homo sapiens
gctctccctacctcagcccc

SEQ ID NO: 13092 - DNA, 20 bp, Homo sapiens
gttaaaggtttagactcctg

SEQ ID NO: 13093 - DNA, 20 bp, Homo sapiens
agttaaaggtttagactcct

SEQ ID NO: 13094 - DNA, 20 bp, Homo sapiens
aagttaaaggtttagactcc

SEQ ID NO: 13095 - DNA, 20 bp, Homo sapiens
ccagggaaagaggaagttaa

SEQ ID NO: 13096 - DNA, 20 bp, Homo sapiens
ctccttagtcccagggaaag

SEQ ID NO: 13097 - DNA, 20 bp, Homo sapiens
cctttaacttcctctttccc

SEQ ID NO: 13098 - DNA, 20 bp, Homo sapiens
ctttaacttcctctttccct

SEQ ID NO: 13099 - DNA, 20 bp, Homo sapiens
tgcagcactccttagtccca

SEQ ID NO: 13100 - DNA, 20 bp, Homo sapiens
gtgcagcactccttagtccc

SEQ ID NO: 13101 - DNA, 20 bp, Homo sapiens
ttcctctttccctgggacta

SEQ ID NO: 13102 - DNA, 20 bp, Homo sapiens
actaaggagtgctgcacccc

SEQ ID NO: 13103 - DNA, 20 bp, Homo sapiens
tggggtaagggaggcgcctg

SEQ ID NO: 13104 - DNA, 20 bp, Homo sapiens
gtggggtaagggaggcgcct

SEQ ID NO: 13105 - DNA, 20 bp, Homo sapiens
tgtggggtaagggaggcgcc

SEQ ID NO: 13106 - DNA, 20 bp, Homo sapiens
ggagggatgtggggtaaggg

SEQ ID NO: 13107 - DNA, 20 bp, Homo sapiens
tgaggagggatgtggggtaa

SEQ ID NO: 13108 - DNA, 20 bp, Homo sapiens
ctgaggagggatgtggggta

SEQ ID NO: 13109 - DNA, 20 bp, Homo sapiens
ggaggctgaggagggatgtg

SEQ ID NO: 13110 - DNA, 20 bp, Homo sapiens
gggaggctgaggagggatgt

SEQ ID NO: 13111 - DNA, 20 bp, Homo sapiens
ggggaggctgaggagggatg

SEQ ID NO: 13112 - DNA, 20 bp, Homo sapiens
tgaggaggggaggctgagga

SEQ ID NO: 13113 - DNA, 20 bp, Homo sapiens
ctgaggaggggaggctgagg

SEQ ID NO: 13114 - DNA, 20 bp, Homo sapiens
aggctgaggaggggaggctg

SEQ ID NO: 13115 - DNA, 20 bp, Homo sapiens
gctctgaggctgaggagggg

SEQ ID NO: 13116 - DNA, 20 bp, Homo sapiens
aatgctctgaggctgaggag

SEQ ID NO: 13117 - DNA, 20 bp, Homo sapiens
aaatgctctgaggctgagga

SEQ ID NO: 13118 - DNA, 20 bp, Homo sapiens
caaatgctctgaggctgagg

SEQ ID NO: 13119 - DNA, 20 bp, Homo sapiens
tagcaaatgctctgaggctg

SEQ ID NO: 13120 - DNA, 20 bp, Homo sapiens
gcgaattagcaaatgctctg

SEQ ID NO: 13121 - DNA, 20 bp, Homo sapiens
acatggctgcaggggaggaa

SEQ ID NO: 13122 - DNA, 20 bp, Homo sapiens
gagccacatggctgcagggg

SEQ ID NO: 13123 - DNA, 20 bp, Homo sapiens
ccggagccacatggctgcag

SEQ ID NO: 13124 - DNA, 20 bp, Homo sapiens
tccggagccacatggctgca

SEQ ID NO: 13125 - DNA, 20 bp, Homo sapiens
ctccggagccacatggctgc

SEQ ID NO: 13126 - DNA, 20 bp, Homo sapiens
tttcctcccctgcagccatg

SEQ ID NO: 13127 - DNA, 20 bp, Homo sapiens
acgatggctccggagccaca

SEQ ID NO: 13128 - DNA, 20 bp, Homo sapiens
cccctgcagccatgtggctc

SEQ ID NO: 13129 - DNA, 20 bp, Homo sapiens
ggcagagctgacgatggctc

SEQ ID NO: 13130 - DNA, 20 bp, Homo sapiens
aggccaggcagagctgacga

SEQ ID NO: 13131 - DNA, 20 bp, Homo sapiens
gagccatcgtcagctctgcc

SEQ ID NO: 13132 - DNA, 20 bp, Homo sapiens
cacagactagcaggaaggcc

SEQ ID NO: 13133 - DNA, 20 bp, Homo sapiens
gaggacacagactagcagga

SEQ ID NO: 13134 - DNA, 20 bp, Homo sapiens
cagagaggacacagactagc

SEQ ID NO: 13135 - DNA, 20 bp, Homo sapiens
ggaggaagaagattacagag

SEQ ID NO: 13136 - DNA, 20 bp, Homo sapiens
agctgtcttgatggatatgg

SEQ ID NO: 13137 - DNA, 20 bp, Homo sapiens
gaaagctgtcttgatggata

SEQ ID NO: 13138 - DNA, 20 bp, Homo sapiens
catgtggaaagctgtcttga

SEQ ID NO: 13139 - DNA, 20 bp, Homo sapiens
catcaagacagctttccaca

SEQ ID NO: 13140 - DNA, 20 bp, Homo sapiens
atcgacaggcctaggccatg

SEQ ID NO: 13141 - DNA, 20 bp, Homo sapiens
gacagctttccacatggcct

SEQ ID NO: 13142 - DNA, 20 bp, Homo sapiens
gacacaggatcgacaggcct

SEQ ID NO: 13143 - DNA, 20 bp, Homo sapiens
ggtctggacacaggatcgac

SEQ ID NO: 13144 - DNA, 20 bp, Homo sapiens
ccaggcggcggtctggacac

SEQ ID NO: 13145 - DNA, 20 bp, Homo sapiens
ggtgtcaccaggcggcggtc

SEQ ID NO: 13146 - DNA, 20 bp, Homo sapiens
cctgtgtccagaccgccgcc

SEQ ID NO: 13147 - DNA, 20 bp, Homo sapiens
ctgggggtgtcaccaggcgg

SEQ ID NO: 13148 - DNA, 20 bp, Homo sapiens
ccactgggggtgtcaccagg

SEQ ID NO: 13149 - DNA, 20 bp, Homo sapiens
tggccactgggggtgtcacc

SEQ ID NO: 13150 - DNA, 20 bp, Homo sapiens
ccgcctggtgacacccccag

SEQ ID NO: 13151 - DNA, 20 bp, Homo sapiens
aggcagaagatggccactgg

SEQ ID NO: 13152 - DNA, 20 bp, Homo sapiens
caggcagaagatggccactg

SEQ ID NO: 13153 - DNA, 20 bp, Homo sapiens
gcaggcagaagatggccact

SEQ ID NO: 13154 - DNA, 20 bp, Homo sapiens
ggcaggcagaagatggccac

SEQ ID NO: 13155 - DNA, 20 bp, Homo sapiens
agtacccggcaggcagaaga

SEQ ID NO: 13156 - DNA, 20 bp, Homo sapiens
agtggccatcttctgcctgc

SEQ ID NO: 13157 - DNA, 20 bp, Homo sapiens
gtggccatcttctgcctgcc

SEQ ID NO: 13158 - DNA, 20 bp, Homo sapiens
ggcccatcgcagtacccggc

SEQ ID NO: 13159 - DNA, 20 bp, Homo sapiens
ttggggcccatcgcagtacc

SEQ ID NO: 13160 - DNA, 20 bp, Homo sapiens
ctgcctgccgggtactgcga

SEQ ID NO: 13161 - DNA, 20 bp, Homo sapiens
tgcctgccgggtactgcgat

SEQ ID NO: 13162 - DNA, 20 bp, Homo sapiens
gacaggaagaggaggcgttg

SEQ ID NO: 13163 - DNA, 20 bp, Homo sapiens
ggacaggaagaggaggcgtt

SEQ ID NO: 13164 - DNA, 20 bp, Homo sapiens
gggacaggaagaggaggcgt

SEQ ID NO: 13165 - DNA, 20 bp, Homo sapiens
gtgctggggacaggaagagg

SEQ ID NO: 13166 - DNA, 20 bp, Homo sapiens
agggtgctggggacaggaag

SEQ ID NO: 13167 - DNA, 20 bp, Homo sapiens
ggaagcagggtgctggggac

SEQ ID NO: 13168 - DNA, 20 bp, Homo sapiens
gagagggaagcagggtgctg

SEQ ID NO: 13169 - DNA, 20 bp, Homo sapiens
ggagagggaagcagggtgct

SEQ ID NO: 13170 - DNA, 20 bp, Homo sapiens
cggagagggaagcagggtgc

SEQ ID NO: 13171 - DNA, 20 bp, Homo sapiens
aggtgccggagagggaagca

SEQ ID NO: 13172 - DNA, 20 bp, Homo sapiens
caggtgccggagagggaagc

SEQ ID NO: 13173 - DNA, 20 bp, Homo sapiens
cagcaccctgcttccctctc

SEQ ID NO: 13174 - DNA, 20 bp, Homo sapiens
gacagtccaggtgccggaga

SEQ ID NO: 13175 - DNA, 20 bp, Homo sapiens
agacagtccaggtgccggag

SEQ ID NO: 13176 - DNA, 20 bp, Homo sapiens
ctgcttccctctccggcacc

SEQ ID NO: 13177 - DNA, 20 bp, Homo sapiens
ggggtagacagtccaggtgc

SEQ ID NO: 13178 - DNA, 20 bp, Homo sapiens
gccattggggtagacagtcc

SEQ ID NO: 13179 - DNA, 20 bp, Homo sapiens
acctggactgtctaccccaa

SEQ ID NO: 13180 - DNA, 20 bp, Homo sapiens
gattaccaaaccggccattg

SEQ ID NO: 13181 - DNA, 20 bp, Homo sapiens
ggactgtctaccccaatggc

SEQ ID NO: 13182 - DNA, 20 bp, Homo sapiens
tgattaccaaaccggccatt

SEQ ID NO: 13183 - DNA, 20 bp, Homo sapiens
ctgattaccaaaccggccat

SEQ ID NO: 13184 - DNA, 20 bp, Homo sapiens
gtctaccccaatggccggtt

SEQ ID NO: 13185 - DNA, 20 bp, Homo sapiens
gtcccatctgattaccaaac

SEQ ID NO: 13186 - DNA, 20 bp, Homo sapiens
tggccggtttggtaatcaga

SEQ ID NO: 13187 - DNA, 20 bp, Homo sapiens
ggccggtttggtaatcagat

SEQ ID NO: 13188 - DNA, 20 bp, Homo sapiens
gggacagtatgccacgctgc

SEQ ID NO: 13189 - DNA, 20 bp, Homo sapiens
ctgggccagagccagcagcg

SEQ ID NO: 13190 - DNA, 20 bp, Homo sapiens
gtatgccacgctgctggctc

SEQ ID NO: 13191 - DNA, 20 bp, Homo sapiens
ggcccggcggccgttgagct

SEQ ID NO: 13192 - DNA, 20 bp, Homo sapiens
ctggctctggcccagctcaa

SEQ ID NO: 13193 - DNA, 20 bp, Homo sapiens
aggcccggcggccgttgagc

SEQ ID NO: 13194 - DNA, 20 bp, Homo sapiens
tggcccagctcaacggccgc

SEQ ID NO: 13195 - DNA, 20 bp, Homo sapiens
ggcccagctcaacggccgcc

SEQ ID NO: 13196 - DNA, 20 bp, Homo sapiens
caggcaggataaaggcccgg

SEQ ID NO: 13197 - DNA, 20 bp, Homo sapiens
tggcaggcaggataaaggcc

SEQ ID NO: 13198 - DNA, 20 bp, Homo sapiens
atgcatggcaggcaggataa

SEQ ID NO: 13199 - DNA, 20 bp, Homo sapiens
gggcggcatgcatggcaggc

SEQ ID NO: 13200 - DNA, 20 bp, Homo sapiens
gccagggcggcatgcatggc

SEQ ID NO: 13201 - DNA, 20 bp, Homo sapiens
cggggccagggcggcatgca

SEQ ID NO: 13202 - DNA, 20 bp, Homo sapiens
gcctgccatgcatgccgccc

SEQ ID NO: 13203 - DNA, 20 bp, Homo sapiens
gcggaataccggggccaggg

SEQ ID NO: 13204 - DNA, 20 bp, Homo sapiens
catgcatgccgccctggccc

SEQ ID NO: 13205 - DNA, 20 bp, Homo sapiens
gatgcggaataccggggcca

SEQ ID NO: 13206 - DNA, 20 bp, Homo sapiens
tgatgcggaataccggggcc

SEQ ID NO: 13207 - DNA, 20 bp, Homo sapiens
cagggtgatgcggaataccg

SEQ ID NO: 13208 - DNA, 20 bp, Homo sapiens
gcagggtgatgcggaatacc

SEQ ID NO: 13209 - DNA, 20 bp, Homo sapiens
ggcagggtgatgcggaatac

SEQ ID NO: 13210 - DNA, 20 bp, Homo sapiens
ccagcacgggcagggtgatg

SEQ ID NO: 13211 - DNA, 20 bp, Homo sapiens
ttctggggccagcacgggca

SEQ ID NO: 13212 - DNA, 20 bp, Homo sapiens
cttctggggccagcacgggc

SEQ ID NO: 13213 - DNA, 20 bp, Homo sapiens
ccgcatcaccctgcccgtgc

SEQ ID NO: 13214 - DNA, 20 bp, Homo sapiens
tccacttctggggccagcac

SEQ ID NO: 13215 - DNA, 20 bp, Homo sapiens
gtccacttctggggccagca

SEQ ID NO: 13216 - DNA, 20 bp, Homo sapiens
gcccgtgctggccccagaag

SEQ ID NO: 13217 - DNA, 20 bp, Homo sapiens
cgtgcggctgtccacttctg

SEQ ID NO: 13218 - DNA, 20 bp, Homo sapiens
gcgtgcggctgtccacttct

SEQ ID NO: 13219 - DNA, 20 bp, Homo sapiens
ggcgtgcggctgtccacttc

SEQ ID NO: 13220 - DNA, 20 bp, Homo sapiens
gcagctcccgccacggcgtg

SEQ ID NO: 13221 - DNA, 20 bp, Homo sapiens
aagtggacagccgcacgccg

SEQ ID NO: 13222 - DNA, 20 bp, Homo sapiens
tggacagccgcacgccgtgg

SEQ ID NO: 13223 - DNA, 20 bp, Homo sapiens
ggacagccgcacgccgtggc

SEQ ID NO: 13224 - DNA, 20 bp, Homo sapiens
tgaagctgcagctcccgcca

SEQ ID NO: 13225 - DNA, 20 bp, Homo sapiens
gggagctgcagcttcacgac

SEQ ID NO: 13226 - DNA, 20 bp, Homo sapiens
gcagcttcacgactggatgt

SEQ ID NO: 13227 - DNA, 20 bp, Homo sapiens
gcttcacgactggatgtcgg

SEQ ID NO: 13228 - DNA, 20 bp, Homo sapiens
ctggatgtcggaggagtacg

SEQ ID NO: 13229 - DNA, 20 bp, Homo sapiens
aagccagagagcttcaggaa

SEQ ID NO: 13230 - DNA, 20 bp, Homo sapiens
aggggaagccagagagcttc

SEQ ID NO: 13231 - DNA, 20 bp, Homo sapiens
gatcctttcctgaagctctc

SEQ ID NO: 13232 - DNA, 20 bp, Homo sapiens
ggaagaaagtccaagagcag

SEQ ID NO: 13233 - DNA, 20 bp, Homo sapiens
tctctggcttcccctgctct

SEQ ID NO: 13234 - DNA, 20 bp, Homo sapiens
tggaagaaagtccaagagca

SEQ ID NO: 13235 - DNA, 20 bp, Homo sapiens
gtggaagaaagtccaagagc

SEQ ID NO: 13236 - DNA, 20 bp, Homo sapiens
ggatctgttcccggagatgg

SEQ ID NO: 13237 - DNA, 20 bp, Homo sapiens
ggactttcttccaccatctc

SEQ ID NO: 13238 - DNA, 20 bp, Homo sapiens
gactttcttccaccatctcc

SEQ ID NO: 13239 - DNA, 20 bp, Homo sapiens
tgcggatctgttcccggaga

SEQ ID NO: 13240 - DNA, 20 bp, Homo sapiens
actctctgcggatctgttcc

SEQ ID NO: 13241 - DNA, 20 bp, Homo sapiens
cgtgcagggtgaactctctg

SEQ ID NO: 13242 - DNA, 20 bp, Homo sapiens
ttcccgaaggtggtcgtgca

SEQ ID NO: 13243 - DNA, 20 bp, Homo sapiens
cttcccgaaggtggtcgtgc

SEQ ID NO: 13244 - DNA, 20 bp, Homo sapiens
tcaccctgcacgaccacctt

SEQ ID NO: 13245 - DNA, 20 bp, Homo sapiens
caccctgcacgaccaccttc

SEQ ID NO: 13246 - DNA, 20 bp, Homo sapiens
tctgcgcctcttcccgaagg

SEQ ID NO: 13247 - DNA, 20 bp, Homo sapiens
cactctgcgcctcttcccga

SEQ ID NO: 13248 - DNA, 20 bp, Homo sapiens
gcacgaccaccttcgggaag

SEQ ID NO: 13249 - DNA, 20 bp, Homo sapiens
ggaagaggcgcagagtgtgc

SEQ ID NO: 13250 - DNA, 20 bp, Homo sapiens
gaagaggcgcagagtgtgct

SEQ ID NO: 13251 - DNA, 20 bp, Homo sapiens
tgtgctgggtcagctccgcc

SEQ ID NO: 13252 - DNA, 20 bp, Homo sapiens
gtgctgggtcagctccgcct

SEQ ID NO: 13253 - DNA, 20 bp, Homo sapiens
ggtcccctgtgcggcccagg

SEQ ID NO: 13254 - DNA, 20 bp, Homo sapiens
ggcggtcccctgtgcggccc

SEQ ID NO: 13255 - DNA, 20 bp, Homo sapiens
cagctccgcctgggccgcac

SEQ ID NO: 13256 - DNA, 20 bp, Homo sapiens
agctccgcctgggccgcaca

SEQ ID NO: 13257 - DNA, 20 bp, Homo sapiens
gctccgcctgggccgcacag

SEQ ID NO: 13258 - DNA, 20 bp, Homo sapiens
tgcgcgggcggtcccctgtg

SEQ ID NO: 13259 - DNA, 20 bp, Homo sapiens
cgccgacaaaggtgcgcggg

SEQ ID NO: 13260 - DNA, 20 bp, Homo sapiens
ggacgccgacaaaggtgcgc

SEQ ID NO: 13261 - DNA, 20 bp, Homo sapiens
tggacgccgacaaaggtgcg

SEQ ID NO: 13262 - DNA, 20 bp, Homo sapiens
gaccgcccgcgcacctttgt

SEQ ID NO: 13263 - DNA, 20 bp, Homo sapiens
gcgcacgtggacgccgacaa

SEQ ID NO: 13264 - DNA, 20 bp, Homo sapiens
gatagtccccacggcgcacg

SEQ ID NO: 13265 - DNA, 20 bp, Homo sapiens
gtcggcgtccacgtgcgccg

SEQ ID NO: 13266 - DNA, 20 bp, Homo sapiens
tcggcgtccacgtgcgccgt

SEQ ID NO: 13267 - DNA, 20 bp, Homo sapiens
cggcgtccacgtgcgccgtg

SEQ ID NO: 13268 - DNA, 20 bp, Homo sapiens
taacctgcagatagtcccca

SEQ ID NO: 13269 - DNA, 20 bp, Homo sapiens
gcgccgtggggactatctgc

SEQ ID NO: 13270 - DNA, 20 bp, Homo sapiens
tgcaggttatgcctcagcgc

SEQ ID NO: 13271 - DNA, 20 bp, Homo sapiens
accacacccttccagcgctg

SEQ ID NO: 13272 - DNA, 20 bp, Homo sapiens
ggttatgcctcagcgctgga

SEQ ID NO: 13273 - DNA, 20 bp, Homo sapiens
gttatgcctcagcgctggaa

SEQ ID NO: 13274 - DNA, 20 bp, Homo sapiens
gcctcagcgctggaagggtg

SEQ ID NO: 13275 - DNA, 20 bp, Homo sapiens
tcagcgctggaagggtgtgg

SEQ ID NO: 13276 - DNA, 20 bp, Homo sapiens
cagcgctggaagggtgtggt

SEQ ID NO: 13277 - DNA, 20 bp, Homo sapiens
tgggcgacagcgcctacctc

SEQ ID NO: 13278 - DNA, 20 bp, Homo sapiens
gtccatggcctgccggaggt

SEQ ID NO: 13279 - DNA, 20 bp, Homo sapiens
cgacagcgcctacctccggc

SEQ ID NO: 13280 - DNA, 20 bp, Homo sapiens
accagtccatggcctgccgg

SEQ ID NO: 13281 - DNA, 20 bp, Homo sapiens
ggaaccagtccatggcctgc

SEQ ID NO: 13282 - DNA, 20 bp, Homo sapiens
cgcctacctccggcaggcca

SEQ ID NO: 13283 - DNA, 20 bp, Homo sapiens
acctccggcaggccatggac

SEQ ID NO: 13284 - DNA, 20 bp, Homo sapiens
ccgtgcccggaaccagtcca

SEQ ID NO: 13285 - DNA, 20 bp, Homo sapiens
ggcaggccatggactggttc

SEQ ID NO: 13286 - DNA, 20 bp, Homo sapiens
gcaggccatggactggttcc

SEQ ID NO: 13287 - DNA, 20 bp, Homo sapiens
ccatggactggttccgggca

SEQ ID NO: 13288 - DNA, 20 bp, Homo sapiens
cgggggcttcgtgccgtgcc

SEQ ID NO: 13289 - DNA, 20 bp, Homo sapiens
gctggtgaccacgaaaacgg

SEQ ID NO: 13290 - DNA, 20 bp, Homo sapiens
tgctggtgaccacgaaaacg

SEQ ID NO: 13291 - DNA, 20 bp, Homo sapiens
ttgctggtgaccacgaaaac

SEQ ID NO: 13292 - DNA, 20 bp, Homo sapiens
gcacgaagcccccgttttcg

SEQ ID NO: 13293 - DNA, 20 bp, Homo sapiens
gttgctggtgaccacgaaaa

SEQ ID NO: 13294 - DNA, 20 bp, Homo sapiens
gttttcgtggtcaccagcaa

SEQ ID NO: 13295 - DNA, 20 bp, Homo sapiens
acaccactccatgccgttgc

SEQ ID NO: 13296 - DNA, 20 bp, Homo sapiens
cgtggtcaccagcaacggca

SEQ ID NO: 13297 - DNA, 20 bp, Homo sapiens
tcaccagcaacggcatggag

SEQ ID NO: 13298 - DNA, 20 bp, Homo sapiens
agaaaacatcgacacctccc

SEQ ID NO: 13299 - DNA, 20 bp, Homo sapiens
gaaaacatcgacacctccca

SEQ ID NO: 13300 - DNA, 20 bp, Homo sapiens
aaacgtcacatcgccctggg

SEQ ID NO: 13301 - DNA, 20 bp, Homo sapiens
agcaaacgtcacatcgccct

SEQ ID NO: 13302 - DNA, 20 bp, Homo sapiens
cagcaaacgtcacatcgccc

SEQ ID NO: 13303 - DNA, 20 bp, Homo sapiens
cagggcgatgtgacgtttgc

SEQ ID NO: 13304 - DNA, 20 bp, Homo sapiens
gatgtgacgtttgctggcga

SEQ ID NO: 13305 - DNA, 20 bp, Homo sapiens
gacgtttgctggcgatggac

SEQ ID NO: 13306 - DNA, 20 bp, Homo sapiens
gtttgctggcgatggacagg

SEQ ID NO: 13307 - DNA, 20 bp, Homo sapiens
atggacaggaggctacaccg

SEQ ID NO: 13308 - DNA, 20 bp, Homo sapiens
agcagggcaaagtctttcca

SEQ ID NO: 13309 - DNA, 20 bp, Homo sapiens
tgccaatggtcataatggtg

SEQ ID NO: 13310 - DNA, 20 bp, Homo sapiens
gaaggtgccaatggtcataa

SEQ ID NO: 13311 - DNA, 20 bp, Homo sapiens
aaccacaccattatgaccat

SEQ ID NO: 13312 - DNA, 20 bp, Homo sapiens
ccagaagccgaaggtgccaa

SEQ ID NO: 13313 - DNA, 20 bp, Homo sapiens
attatgaccattggcacctt

SEQ ID NO: 13314 - DNA, 20 bp, Homo sapiens
gtaggcagcccagaagccga

SEQ ID NO: 13315 - DNA, 20 bp, Homo sapiens
ccattggcaccttcggcttc

SEQ ID NO: 13316 - DNA, 20 bp, Homo sapiens
cattggcaccttcggcttct

SEQ ID NO: 13317 - DNA, 20 bp, Homo sapiens
cggcttctgggctgcctacc

SEQ ID NO: 13318 - DNA, 20 bp, Homo sapiens
agtgtctccgccagccaggt

SEQ ID NO: 13319 - DNA, 20 bp, Homo sapiens
ttctgggctgcctacctggc

SEQ ID NO: 13320 - DNA, 20 bp, Homo sapiens
tgggctgcctacctggctgg

SEQ ID NO: 13321 - DNA, 20 bp, Homo sapiens
agacagtgtctccgccagcc

SEQ ID NO: 13322 - DNA, 20 bp, Homo sapiens
tggcggagacactgtctacc

SEQ ID NO: 13323 - DNA, 20 bp, Homo sapiens
ctggcagggtgaagttggcc

SEQ ID NO: 13324 - DNA, 20 bp, Homo sapiens
agagtctggcagggtgaagt

SEQ ID NO: 13325 - DNA, 20 bp, Homo sapiens
caggaactcagagtctggca

SEQ ID NO: 13326 - DNA, 20 bp, Homo sapiens
tcaggaactcagagtctggc

SEQ ID NO: 13327 - DNA, 20 bp, Homo sapiens
atcttcaggaactcagagtc

SEQ ID NO: 13328 - DNA, 20 bp, Homo sapiens
cctccggcttaaagatcttc

SEQ ID NO: 13329 - DNA, 20 bp, Homo sapiens
gttcctgaagatctttaagc

SEQ ID NO: 13330 - DNA, 20 bp, Homo sapiens
cctgaagatctttaagccgg

SEQ ID NO: 13331 - DNA, 20 bp, Homo sapiens
gaagatctttaagccggagg

SEQ ID NO: 13332 - DNA, 20 bp, Homo sapiens
tcgggcaggaaggccgcctc

SEQ ID NO: 13333 - DNA, 20 bp, Homo sapiens
gcccacccactcgggcagga

SEQ ID NO: 13334 - DNA, 20 bp, Homo sapiens
taatgcccacccactcgggc

SEQ ID NO: 13335 - DNA, 20 bp, Homo sapiens
aggcggccttcctgcccgag

SEQ ID NO: 13336 - DNA, 20 bp, Homo sapiens
ggcggccttcctgcccgagt

SEQ ID NO: 13337 - DNA, 20 bp, Homo sapiens
gcattaatgcccacccactc

SEQ ID NO: 13338 - DNA, 20 bp, Homo sapiens
ggccttcctgcccgagtggg

SEQ ID NO: 13339 - DNA, 20 bp, Homo sapiens
tgcattaatgcccacccact

SEQ ID NO: 13340 - DNA, 20 bp, Homo sapiens
gccttcctgcccgagtgggt

SEQ ID NO: 13341 - DNA, 20 bp, Homo sapiens
atgcagacttgtctccactc

SEQ ID NO: 13342 - DNA, 20 bp, Homo sapiens
ggcttagccaatgtccagag

SEQ ID NO: 13343 - DNA, 20 bp, Homo sapiens
cttgtctccactctggacat

SEQ ID NO: 13344 - DNA, 20 bp, Homo sapiens
gaaagtctccctggctctca

SEQ ID NO: 13345 - DNA, 20 bp, Homo sapiens
ttggctaagccttgagagcc

SEQ ID NO: 13346 - DNA, 20 bp, Homo sapiens
tggctaagccttgagagcca

SEQ ID NO: 13347 - DNA, 20 bp, Homo sapiens
gctacttcagaaagtctccc

SEQ ID NO: 13348 - DNA, 20 bp, Homo sapiens
ctgctggctctagaaagatc

SEQ ID NO: 13349 - DNA, 20 bp, Homo sapiens
cctctgaagccacgtactgc

SEQ ID NO: 13350 - DNA, 20 bp, Homo sapiens
tttctagagccagcagtacg

SEQ ID NO: 13351 - DNA, 20 bp, Homo sapiens
ccagcagtacgtggcttcag

SEQ ID NO: 13352 - DNA, 20 bp, Homo sapiens
agtacgtggcttcagaggcc

SEQ ID NO: 13353 - DNA, 20 bp, Homo sapiens
aagcttctccagaagatgcc

SEQ ID NO: 13354 - DNA, 20 bp, Homo sapiens
ttcagaggcctggcatcttc

SEQ ID NO: 13355 - DNA, 20 bp, Homo sapiens
gcatcttctggagaagcttg

SEQ ID NO: 13356 - DNA, 20 bp, Homo sapiens
tacgggcacccatttgcttc

SEQ ID NO: 13357 - DNA, 20 bp, Homo sapiens
tgtggtgttcctgaagcaaa

SEQ ID NO: 13358 - DNA, 20 bp, Homo sapiens
gtggtgttcctgaagcaaat

SEQ ID NO: 13359 - DNA, 20 bp, Homo sapiens
actagaatcactctggatac

SEQ ID NO: 13360 - DNA, 20 bp, Homo sapiens
aactagaatcactctggata

SEQ ID NO: 13361 - DNA, 20 bp, Homo sapiens
tctcccaactagaatcactc

SEQ ID NO: 13362 - DNA, 20 bp, Homo sapiens
gtatccagagtgattctagt

SEQ ID NO: 13363 - DNA, 20 bp, Homo sapiens
tatccagagtgattctagtt

SEQ ID NO: 13364 - DNA, 20 bp, Homo sapiens
gtgattctagttgggagagt

SEQ ID NO: 13365 - DNA, 20 bp, Homo sapiens
agttgggagagttggagaga

SEQ ID NO: 13366 - DNA, 20 bp, Homo sapiens
gttgggagagttggagagaa

SEQ ID NO: 13367 - DNA, 20 bp, Homo sapiens
ttgggagagttggagagaag

SEQ ID NO: 13368 - DNA, 20 bp, Homo sapiens
tgggagagttggagagaagg

SEQ ID NO: 13369 - DNA, 20 bp, Homo sapiens
ggagagaagggggacgtttc

SEQ ID NO: 13370 - DNA, 20 bp, Homo sapiens
agcaaaacatcttttcctga

SEQ ID NO: 13371 - DNA, 20 bp, Homo sapiens
aaacatcttttcctgatggc

SEQ ID NO: 13372 - DNA, 20 bp, Homo sapiens
agaactgcctgccagccatc

SEQ ID NO: 13373 - DNA, 20 bp, Homo sapiens
atcttttcctgatggctggc

SEQ ID NO: 13374 - DNA, 20 bp, Homo sapiens
ggaagagcaggtgggcactg

SEQ ID NO: 13375 - DNA, 20 bp, Homo sapiens
atgggctgggaagagcaggt

SEQ ID NO: 13376 - DNA, 20 bp, Homo sapiens
tatgggctgggaagagcagg

SEQ ID NO: 13377 - DNA, 20 bp, Homo sapiens
agatatgggctgggaagagc

SEQ ID NO: 13378 - DNA, 20 bp, Homo sapiens
aagtactgtagatatgggct

SEQ ID NO: 13379 - DNA, 20 bp, Homo sapiens
gaagtactgtagatatgggc

SEQ ID NO: 13380 - DNA, 20 bp, Homo sapiens
tctggaagtactgtagatat

SEQ ID NO: 13381 - DNA, 20 bp, Homo sapiens
atctggaagtactgtagata

SEQ ID NO: 13382 - DNA, 20 bp, Homo sapiens
atatctacagtacttccaga

SEQ ID NO: 13383 - DNA, 20 bp, Homo sapiens
cattcctgggggcagccatc

SEQ ID NO: 13384 - DNA, 20 bp, Homo sapiens
acttccagatggctgccccc

SEQ ID NO: 13385 - DNA, 20 bp, Homo sapiens
ggagagttccccattcctgg

SEQ ID NO: 13386 - DNA, 20 bp, Homo sapiens
cagatggctgcccccaggaa

SEQ ID NO: 13387 - DNA, 20 bp, Homo sapiens
gggagagttccccattcctg

SEQ ID NO: 13388 - DNA, 20 bp, Homo sapiens
agatggctgcccccaggaat

SEQ ID NO: 13389 - DNA, 20 bp, Homo sapiens
agggagagttccccattcct

SEQ ID NO: 13390 - DNA, 20 bp, Homo sapiens
gatggctgcccccaggaatg

SEQ ID NO: 13391 - DNA, 20 bp, Homo sapiens
gagggagagttccccattcc

SEQ ID NO: 13392 - DNA, 20 bp, Homo sapiens
ggaatggggaactctccctc

SEQ ID NO: 13393 - DNA, 20 bp, Homo sapiens
ctcttctagagtagaccaga

SEQ ID NO: 13394 - DNA, 20 bp, Homo sapiens
cctcttctagagtagaccag

SEQ ID NO: 13395 - DNA, 20 bp, Homo sapiens
cctctggtctactctagaag

SEQ ID NO: 13396 - DNA, 20 bp, Homo sapiens
ctctggtctactctagaaga

SEQ ID NO: 13397 - DNA, 20 bp, Homo sapiens
tctggtctactctagaagag

SEQ ID NO: 13398 - DNA, 20 bp, Homo sapiens
aagaggggttacttctcccc

SEQ ID NO: 13399 - DNA, 20 bp, Homo sapiens
agaggggttacttctcccct

SEQ ID NO: 13400 - DNA, 20 bp, Homo sapiens
tcagtctttggaggacccag

SEQ ID NO: 13401 - DNA, 20 bp, Homo sapiens
ttcagtctttggaggaccca

SEQ ID NO: 13402 - DNA, 20 bp, Homo sapiens
cttcagtctttggaggaccc

SEQ ID NO: 13403 - DNA, 20 bp, Homo sapiens
tatgctccttcagtctttgg

SEQ ID NO: 13404 - DNA, 20 bp, Homo sapiens
tcatatgctccttcagtctt

SEQ ID NO: 13405 - DNA, 20 bp, Homo sapiens
ctgggtcctccaaagactga

SEQ ID NO: 13406 - DNA, 20 bp, Homo sapiens
gacttggtgaatgcttgctc

SEQ ID NO: 13407 - DNA, 20 bp, Homo sapiens
cagaaacacagaaggggact

SEQ ID NO: 13408 - DNA, 20 bp, Homo sapiens
tcactccagaaacacagaag

SEQ ID NO: 13409 - DNA, 20 bp, Homo sapiens
atcactccagaaacacagaa

SEQ ID NO: 13410 - DNA, 20 bp, Homo sapiens
aatcactccagaaacacaga

SEQ ID NO: 13411 - DNA, 20 bp, Homo sapiens
caagtccccttctgtgtttc

SEQ ID NO: 13412 - DNA, 20 bp, Homo sapiens
tgtttctggagtgattctag

SEQ ID NO: 13413 - DNA, 20 bp, Homo sapiens
gtttctggagtgattctaga

SEQ ID NO: 13414 - DNA, 20 bp, Homo sapiens
gagggagacttgttctagag

SEQ ID NO: 13415 - DNA, 20 bp, Homo sapiens
gacttgttctagagaggacc

SEQ ID NO: 13416 - DNA, 20 bp, Homo sapiens
ttcttcacaggcatcaaacc

SEQ ID NO: 13417 - DNA, 20 bp, Homo sapiens
ggccctgcagggttcttcac

SEQ ID NO: 13418 - DNA, 20 bp, Homo sapiens
atgcctgtgaagaaccctgc

SEQ ID NO: 13419 - DNA, 20 bp, Homo sapiens
tgcctgtgaagaaccctgca

SEQ ID NO: 13420 - DNA, 20 bp, Homo sapiens
ctgtccataagggccctgca

SEQ ID NO: 13421 - DNA, 20 bp, Homo sapiens
cctgtccataagggccctgc

SEQ ID NO: 13422 - DNA, 20 bp, Homo sapiens
agaaccctgcagggccctta

SEQ ID NO: 13423 - DNA, 20 bp, Homo sapiens
gaaccccatcctgtccataa

SEQ ID NO: 13424 - DNA, 20 bp, Homo sapiens
agaaccccatcctgtccata

SEQ ID NO: 13425 - DNA, 20 bp, Homo sapiens
cctgcagggcccttatggac

SEQ ID NO: 13426 - DNA, 20 bp, Homo sapiens
cagggcccttatggacagga

SEQ ID NO: 13427 - DNA, 20 bp, Homo sapiens
agggcccttatggacaggat

SEQ ID NO: 13428 - DNA, 20 bp, Homo sapiens
gggcccttatggacaggatg

SEQ ID NO: 13429 - DNA, 20 bp, Homo sapiens
ttatggacaggatggggttc

SEQ ID NO: 13430 - DNA, 20 bp, Homo sapiens
gattcttcaccttagttatc

SEQ ID NO: 13431 - DNA, 20 bp, Homo sapiens
tctggaaatccagataacta

SEQ ID NO: 13432 - DNA, 20 bp, Homo sapiens
ttttttttttttttggagac

SEQ ID NO: 13433 - DNA, 20 bp, Homo sapiens
tttttttttttttggagaca

SEQ ID NO: 13434 - DNA, 20 bp, Homo sapiens
agggtctcgctctgttgccc

SEQ ID NO: 13435 - DNA, 20 bp, Homo sapiens
tctcgctctgttgcccaggc

SEQ ID NO: 13436 - DNA, 20 bp, Homo sapiens
acgccactgcactccagcct

SEQ ID NO: 13437 - DNA, 20 bp, Homo sapiens
cacgccactgcactccagcc

SEQ ID NO: 13438 - DNA, 20 bp, Homo sapiens
ttgcccaggctggagtgcag

SEQ ID NO: 13439 - DNA, 20 bp, Homo sapiens
ggagtgcagtggcgtgatct

SEQ ID NO: 13440 - DNA, 20 bp, Homo sapiens
aatcgcttgaacacaggagg

SEQ ID NO: 13441 - DNA, 20 bp, Homo sapiens
gagaatcgcttgaacacagg

SEQ ID NO: 13442 - DNA, 20 bp, Homo sapiens
caggagaatcgcttgaacac

SEQ ID NO: 13443 - DNA, 20 bp, Homo sapiens
tctactcaggaggctgagac

SEQ ID NO: 13444 - DNA, 20 bp, Homo sapiens
tgtagtcccatctactcagg

SEQ ID NO: 13445 - DNA, 20 bp, Homo sapiens
gcctgtagtcccatctactc

SEQ ID NO: 13446 - DNA, 20 bp, Homo sapiens
gtctcagcctcctgagtaga

SEQ ID NO: 13447 - DNA, 20 bp, Homo sapiens
tctcagcctcctgagtagat

SEQ ID NO: 13448 - DNA, 20 bp, Homo sapiens
tcctgagtagatgggactac

SEQ ID NO: 13449 - DNA, 20 bp, Homo sapiens
gtagatgggactacaggcac

SEQ ID NO: 13450 - DNA, 20 bp, Homo sapiens
caaaaattagccaggcataa

SEQ ID NO: 13451 - DNA, 20 bp, Homo sapiens
caggcacaggccattatgcc

SEQ ID NO: 13452 - DNA, 20 bp, Homo sapiens
taaaaatacaaaaattagcc

SEQ ID NO: 13453 - DNA, 20 bp, Homo sapiens
tttgtatttttagtagagac

SEQ ID NO: 13454 - DNA, 20 bp, Homo sapiens
ttgtatttttagtagagaca

SEQ ID NO: 13455 - DNA, 20 bp, Homo sapiens
gagacagggtttcaccatgt

SEQ ID NO: 13456 - DNA, 20 bp, Homo sapiens
cgagaccatcctggccaaca

SEQ ID NO: 13457 - DNA, 20 bp, Homo sapiens
agggtttcaccatgttggcc

SEQ ID NO: 13458 - DNA, 20 bp, Homo sapiens
tttcaccatgttggccagga

SEQ ID NO: 13459 - DNA, 20 bp, Homo sapiens
tcaggagatcgagaccatcc

SEQ ID NO: 13460 - DNA, 20 bp, Homo sapiens
gacaggtggatgacaaggtc

SEQ ID NO: 13461 - DNA, 20 bp, Homo sapiens
gccaagacaggtggatgaca

SEQ ID NO: 13462 - DNA, 20 bp, Homo sapiens
ctttgggaggccaagacagg

SEQ ID NO: 13463 - DNA, 20 bp, Homo sapiens
accttgtcatccacctgtct

SEQ ID NO: 13464 - DNA, 20 bp, Homo sapiens
gcactttgggaggccaagac

SEQ ID NO: 13465 - DNA, 20 bp, Homo sapiens
agtaatcccagcactttggg

SEQ ID NO: 13466 - DNA, 20 bp, Homo sapiens
gccagtaatcccagcacttt

SEQ ID NO: 13467 - DNA, 20 bp, Homo sapiens
gtcttggcctcccaaagtgc

SEQ ID NO: 13468 - DNA, 20 bp, Homo sapiens
tgccagtaatcccagcactt

SEQ ID NO: 13469 - DNA, 20 bp, Homo sapiens
tcttggcctcccaaagtgct

SEQ ID NO: 13470 - DNA, 20 bp, Homo sapiens
tcccaaagtgctgggattac

SEQ ID NO: 13471 - DNA, 20 bp, Homo sapiens
aatatccgggctgggcacag

SEQ ID NO: 13472 - DNA, 20 bp, Homo sapiens
atgagccactgtgcccagcc

SEQ ID NO: 13473 - DNA, 20 bp, Homo sapiens
aaaaaaaaaatatccgggct

SEQ ID NO: 13474 - DNA, 20 bp, Homo sapiens
taaaaaaaaaatatccgggc

SEQ ID NO: 13475 - DNA, 20 bp, Homo sapiens
taattaaaaaaaaaatatcc

SEQ ID NO: 13476 - DNA, 20 bp, Homo sapiens
ataattaaaaaaaaaatatc

SEQ ID NO: 13477 - DNA, 20 bp, Homo sapiens
tatttatttatttattgaga

SEQ ID NO: 13478 - DNA, 20 bp, Homo sapiens
ggagtcttgctctgtagccc

SEQ ID NO: 13479 - DNA, 20 bp, Homo sapiens
gcgccactgcactctggcct

SEQ ID NO: 13480 - DNA, 20 bp, Homo sapiens
cgcgccactgcactctggcc

SEQ ID NO: 13481 - DNA, 20 bp, Homo sapiens
gagatcgcgccactgcactc

SEQ ID NO: 13482 - DNA, 20 bp, Homo sapiens
tagcccaggccagagtgcag

SEQ ID NO: 13483 - DNA, 20 bp, Homo sapiens
tcactgcaagctctgcctcc

SEQ ID NO: 13484 - DNA, 20 bp, Homo sapiens
cactgcaagctctgcctccc

SEQ ID NO: 13485 - DNA, 20 bp, Homo sapiens
cagaatggcatgaacccggg

SEQ ID NO: 13486 - DNA, 20 bp, Homo sapiens
aggcagaatggcatgaaccc

SEQ ID NO: 13487 - DNA, 20 bp, Homo sapiens
gaggcagaatggcatgaacc

SEQ ID NO: 13488 - DNA, 20 bp, Homo sapiens
ctcaggaggctgaggcagaa

SEQ ID NO: 13489 - DNA, 20 bp, Homo sapiens
cccagctactcaggaggctg

SEQ ID NO: 13490 - DNA, 20 bp, Homo sapiens
tgtagtcccagctactcagg

SEQ ID NO: 13491 - DNA, 20 bp, Homo sapiens
gcctgtagtcccagctactc

SEQ ID NO: 13492 - DNA, 20 bp, Homo sapiens
gcctcagcctcctgagtagc

SEQ ID NO: 13493 - DNA, 20 bp, Homo sapiens
cctcagcctcctgagtagct

SEQ ID NO: 13494 - DNA, 20 bp, Homo sapiens
tcctgagtagctgggactac

SEQ ID NO: 13495 - DNA, 20 bp, Homo sapiens
aattagccgggcgtggtggc

SEQ ID NO: 13496 - DNA, 20 bp, Homo sapiens
aaattagccgggcgtggtgg

SEQ ID NO: 13497 - DNA, 20 bp, Homo sapiens
aaaaaattagccgggcgtgg

SEQ ID NO: 13498 - DNA, 20 bp, Homo sapiens
caggcgcccgccaccacgcc

SEQ ID NO: 13499 - DNA, 20 bp, Homo sapiens
caaaaaaaattagccgggcg

SEQ ID NO: 13500 - DNA, 20 bp, Homo sapiens
aaatacaaaaaaaattagcc

SEQ ID NO: 13501 - DNA, 20 bp, Homo sapiens
aaaatacaaaaaaaattagc

SEQ ID NO: 13502 - DNA, 20 bp, Homo sapiens
ttttgtatttttagtagaga

SEQ ID NO: 13503 - DNA, 20 bp, Homo sapiens
tttgtatttttagtagagac

SEQ ID NO: 13504 - DNA, 20 bp, Homo sapiens
ttgtatttttagtagagacg

SEQ ID NO: 13505 - DNA, 20 bp, Homo sapiens
ggggtttcatcgtgttaacc

SEQ ID NO: 13506 - DNA, 20 bp, Homo sapiens
tttcatcgtgttaaccagga

SEQ ID NO: 13507 - DNA, 20 bp, Homo sapiens
tcaggagatcgagaccatcc

SEQ ID NO: 13508 - DNA, 20 bp, Homo sapiens
ggtgggcagatcacgaggtc

SEQ ID NO: 13509 - DNA, 20 bp, Homo sapiens
gccgaggtgggcagatcacg

SEQ ID NO: 13510 - DNA, 20 bp, Homo sapiens
acctcgtgatctgcccacct

SEQ ID NO: 13511 - DNA, 20 bp, Homo sapiens
gcactgtgggaggccgaggt

SEQ ID NO: 13512 - DNA, 20 bp, Homo sapiens
agcactgtgggaggccgagg

SEQ ID NO: 13513 - DNA, 20 bp, Homo sapiens
cccagcactgtgggaggccg

SEQ ID NO: 13514 - DNA, 20 bp, Homo sapiens
ggtaatcccagcactgtggg

SEQ ID NO: 13515 - DNA, 20 bp, Homo sapiens
gccggtaatcccagcactgt

SEQ ID NO: 13516 - DNA, 20 bp, Homo sapiens
acctcggcctcccacagtgc

SEQ ID NO: 13517 - DNA, 20 bp, Homo sapiens
cgccggtaatcccagcactg

SEQ ID NO: 13518 - DNA, 20 bp, Homo sapiens
cctcggcctcccacagtgct

SEQ ID NO: 13519 - DNA, 20 bp, Homo sapiens
tcccacagtgctgggattac

SEQ ID NO: 13520 - DNA, 20 bp, Homo sapiens
ccaggcatggtggctcacgc

SEQ ID NO: 13521 - DNA, 20 bp, Homo sapiens
attatccgggccaggcatgg

SEQ ID NO: 13522 - DNA, 20 bp, Homo sapiens
ccggcgtgagccaccatgcc

SEQ ID NO: 13523 - DNA, 20 bp, Homo sapiens
aaaattatccgggccaggca

SEQ ID NO: 13524 - DNA, 20 bp, Homo sapiens
gtgagccaccatgcctggcc

SEQ ID NO: 13525 - DNA, 20 bp, Homo sapiens
taaaaaaaattatccgggcc

SEQ ID NO: 13526 - DNA, 20 bp, Homo sapiens
aaaattaaaaaaaattatcc

SEQ ID NO: 13527 - DNA, 20 bp, Homo sapiens
aaaaattaaaaaaaattatc

SEQ ID NO: 13528 - DNA, 20 bp, Homo sapiens
ttttaatttttgtagagacg

SEQ ID NO: 13529 - DNA, 20 bp, Homo sapiens
gaggtcttgtgatattgccc

SEQ ID NO: 13530 - DNA, 20 bp, Homo sapiens
caggagttgaagaacagcct

SEQ ID NO: 13531 - DNA, 20 bp, Homo sapiens
ccaggagttgaagaacagcc

SEQ ID NO: 13532 - DNA, 20 bp, Homo sapiens
ccaggctgttcttcaactcc

SEQ ID NO: 13533 - DNA, 20 bp, Homo sapiens
caggctgttcttcaactcct

SEQ ID NO: 13534 - DNA, 20 bp, Homo sapiens
tgggaggactgcttgagccc

SEQ ID NO: 13535 - DNA, 20 bp, Homo sapiens
ttctgggaggccaaggtggg

SEQ ID NO: 13536 - DNA, 20 bp, Homo sapiens
ctcaagcagtcctcccacct

SEQ ID NO: 13537 - DNA, 20 bp, Homo sapiens
gcattctgggaggccaaggt

SEQ ID NO: 13538 - DNA, 20 bp, Homo sapiens
agcattctgggaggccaagg

SEQ ID NO: 13539 - DNA, 20 bp, Homo sapiens
cccagcattctgggaggcca

SEQ ID NO: 13540 - DNA, 20 bp, Homo sapiens
tataaacccagcattctggg

SEQ ID NO: 13541 - DNA, 20 bp, Homo sapiens
atctataaacccagcattct

SEQ ID NO: 13542 - DNA, 20 bp, Homo sapiens
accttggcctcccagaatgc

SEQ ID NO: 13543 - DNA, 20 bp, Homo sapiens
catctataaacccagcattc

SEQ ID NO: 13544 - DNA, 20 bp, Homo sapiens
ccttggcctcccagaatgct

SEQ ID NO: 13545 - DNA, 20 bp, Homo sapiens
atagatgtgagccagcacac

SEQ ID NO: 13546 - DNA, 20 bp, Homo sapiens
cttcacttggcccggtgtgc

SEQ ID NO: 13547 - DNA, 20 bp, Homo sapiens
tagatgtgagccagcacacc

SEQ ID NO: 13548 - DNA, 20 bp, Homo sapiens
attagattcttcacttggcc

SEQ ID NO: 13549 - DNA, 20 bp, Homo sapiens
cattcattagattcttcact

SEQ ID NO: 13550 - DNA, 20 bp, Homo sapiens
attcattagatgctacaatt

SEQ ID NO: 13551 - DNA, 20 bp, Homo sapiens
ctcaatttttccagcaatgg

SEQ ID NO: 13552 - DNA, 20 bp, Homo sapiens
aatgaatgttccaccattgc

SEQ ID NO: 13553 - DNA, 20 bp, Homo sapiens
catctcaatttttccagcaa

SEQ ID NO: 13554 - DNA, 20 bp, Homo sapiens
cattgctggaaaaattgaga

SEQ ID NO: 13555 - DNA, 20 bp, Homo sapiens
agacgctggccaactagaga

SEQ ID NO: 13556 - DNA, 20 bp, Homo sapiens
gaaaacaaaccatctctagt

SEQ ID NO: 13557 - DNA, 20 bp, Homo sapiens
ctgtgaacagagcaagacgc

SEQ ID NO: 13558 - DNA, 20 bp, Homo sapiens
cttgctctgttcacagtctc

SEQ ID NO: 13559 - DNA, 20 bp, Homo sapiens
ttcacagtctctggaaaagc

SEQ ID NO: 13560 - DNA, 20 bp, Homo sapiens
tcacagtctctggaaaagct

SEQ ID NO: 13561 - DNA, 20 bp, Homo sapiens
cacagtctctggaaaagctg

SEQ ID NO: 13562 - DNA, 20 bp, Homo sapiens
tctggaaaagctggggtagt

SEQ ID NO: 13563 - DNA, 20 bp, Homo sapiens
ggggtagttggtgagcagag

SEQ ID NO: 13564 - DNA, 20 bp, Homo sapiens
gggtagttggtgagcagagc

SEQ ID NO: 13565 - DNA, 20 bp, Homo sapiens
tgaggggctgtggggcttgt

SEQ ID NO: 13566 - DNA, 20 bp, Homo sapiens
aaagtctttgaggggctgtg

SEQ ID NO: 13567 - DNA, 20 bp, Homo sapiens
aaaagtctttgaggggctgt

SEQ ID NO: 13568 - DNA, 20 bp, Homo sapiens
aaaaagtctttgaggggctg

SEQ ID NO: 13569 - DNA, 20 bp, Homo sapiens
aacaaaaaaaagtctttgag

SEQ ID NO: 13570 - DNA, 20 bp, Homo sapiens
aaacaaaaaaaagtctttga

SEQ ID NO: 13571 - DNA, 20 bp, Homo sapiens
caaacaaaaaaaagtctttg

SEQ ID NO: 13572 - DNA, 20 bp, Homo sapiens
tttgtttgttttgagcagac

SEQ ID NO: 13573 - DNA, 20 bp, Homo sapiens
gacaggctaaaatgtgaacg

SEQ ID NO: 13574 - DNA, 20 bp, Homo sapiens
acaggctaaaatgtgaacgt

SEQ ID NO: 13575 - DNA, 20 bp, Homo sapiens
caggctaaaatgtgaacgtg

SEQ ID NO: 13576 - DNA, 20 bp, Homo sapiens
taaaatgtgaacgtggggtg

SEQ ID NO: 13577 - DNA, 20 bp, Homo sapiens
aaaatgtgaacgtggggtga

SEQ ID NO: 13578 - DNA, 20 bp, Homo sapiens
gtgagggatcactgccaaaa

SEQ ID NO: 13579 - DNA, 20 bp, Homo sapiens
ctccagaagctgtaccattt

SEQ ID NO: 13580 - DNA, 20 bp, Homo sapiens
tgccaaaatggtacagcttc

SEQ ID NO: 13581 - DNA, 20 bp, Homo sapiens
cttctggagcagaactttcc

SEQ ID NO: 13582 - DNA, 20 bp, Homo sapiens
ttctggagcagaactttcca

SEQ ID NO: 13583 - DNA, 20 bp, Homo sapiens
aaaaagtgtccctggatccc

SEQ ID NO: 13584 - DNA, 20 bp, Homo sapiens
gcagaactttccagggatcc

SEQ ID NO: 13585 - DNA, 20 bp, Homo sapiens
cagaactttccagggatcca

SEQ ID NO: 13586 - DNA, 20 bp, Homo sapiens
gctttaaaaaaaagtgtccc

SEQ ID NO: 13587 - DNA, 20 bp, Homo sapiens
cacccaatatatggagctct

SEQ ID NO: 13588 - DNA, 20 bp, Homo sapiens
ctgccaagagctccatatat

SEQ ID NO: 13589 - DNA, 20 bp, Homo sapiens
tgccaagagctccatatatt

SEQ ID NO: 13590 - DNA, 20 bp, Homo sapiens
ctgaactcacacccaatata

SEQ ID NO: 13591 - DNA, 20 bp, Homo sapiens
catatattgggtgtgagttc

SEQ ID NO: 13592 - DNA, 20 bp, Homo sapiens
ccaacttccttcattgtgag

SEQ ID NO: 13593 - DNA, 20 bp, Homo sapiens
caggttgcctctcacaatga

SEQ ID NO: 13594 - DNA, 20 bp, Homo sapiens
cctctcacaatgaaggaagt

SEQ ID NO: 13595 - DNA, 20 bp, Homo sapiens
ggaagttggtctttgtctgc

SEQ ID NO: 13596 - DNA, 20 bp, Homo sapiens
agttggtctttgtctgcagg

SEQ ID NO: 13597 - DNA, 20 bp, Homo sapiens
gttggtctttgtctgcaggt

SEQ ID NO: 13598 - DNA, 20 bp, Homo sapiens
tgtctgcaggtgggctgctg

SEQ ID NO: 13599 - DNA, 20 bp, Homo sapiens
gtctgcaggtgggctgctga

SEQ ID NO: 13600 - DNA, 20 bp, Homo sapiens
caggtgggctgctgagggtc

SEQ ID NO: 13601 - DNA, 20 bp, Homo sapiens
aggtgggctgctgagggtct

SEQ ID NO: 13602 - DNA, 20 bp, Homo sapiens
agggtctgggatctgttttc

SEQ ID NO: 13603 - DNA, 20 bp, Homo sapiens
tctgttttctggaagtgtgc

SEQ ID NO: 13604 - DNA, 20 bp, Homo sapiens
cagtttgtcacaagcacaga

SEQ ID NO: 13605 - DNA, 20 bp, Homo sapiens
ccagtttgtcacaagcacag

SEQ ID NO: 13606 - DNA, 20 bp, Homo sapiens
cctctgtgcttgtgacaaac

SEQ ID NO: 13607 - DNA, 20 bp, Homo sapiens
tgtgcttgtgacaaactggc

SEQ ID NO: 13608 - DNA, 20 bp, Homo sapiens
acagtggttagcaatgagca

SEQ ID NO: 13609 - DNA, 20 bp, Homo sapiens
gggagttcagggacagacag

SEQ ID NO: 13610 - DNA, 20 bp, Homo sapiens
gtagtggttctgggagttca

SEQ ID NO: 13611 - DNA, 20 bp, Homo sapiens
tgtagtggttctgggagttc

SEQ ID NO: 13612 - DNA, 20 bp, Homo sapiens
aagccagatgtagtggttct

SEQ ID NO: 13613 - DNA, 20 bp, Homo sapiens
aaagccagatgtagtggttc

SEQ ID NO: 13614 - DNA, 20 bp, Homo sapiens
ctgcccaaagccagatgtag

SEQ ID NO: 13615 - DNA, 20 bp, Homo sapiens
actcccagaaccactacatc

SEQ ID NO: 13616 - DNA, 20 bp, Homo sapiens
agaaccactacatctggctt

SEQ ID NO: 13617 - DNA, 20 bp, Homo sapiens
gaaccactacatctggcttt

SEQ ID NO: 13618 - DNA, 20 bp, Homo sapiens
cactacatctggctttgggc

SEQ ID NO: 13619 - DNA, 20 bp, Homo sapiens
tctgagataaaacgatctaa

SEQ ID NO: 13620 - DNA, 20 bp, Homo sapiens
agataaaacgatctaaaggt

SEQ ID NO: 13621 - DNA, 20 bp, Homo sapiens
atctaaaggtaggcagaccc

SEQ ID NO: 13622 - DNA, 20 bp, Homo sapiens
tggatctgaggctgggtcca

SEQ ID NO: 13623 - DNA, 20 bp, Homo sapiens
ctggatctgaggctgggtcc

SEQ ID NO: 13624 - DNA, 20 bp, Homo sapiens
tcctgcctggatctgaggct

SEQ ID NO: 13625 - DNA, 20 bp, Homo sapiens
ctcctgcctggatctgaggc

SEQ ID NO: 13626 - DNA, 20 bp, Homo sapiens
cgtgctcctgcctggatctg

SEQ ID NO: 13627 - DNA, 20 bp, Homo sapiens
ctggacccagcctcagatcc

SEQ ID NO: 13628 - DNA, 20 bp, Homo sapiens
acccagcctcagatccaggc

SEQ ID NO: 13629 - DNA, 20 bp, Homo sapiens
ccagacctcgtgctcctgcc

SEQ ID NO: 13630 - DNA, 20 bp, Homo sapiens
cagatccaggcaggagcacg

SEQ ID NO: 13631 - DNA, 20 bp, Homo sapiens
ccaggcaggagcacgaggtc

SEQ ID NO: 13632 - DNA, 20 bp, Homo sapiens
aggagcacgaggtctggcca

SEQ ID NO: 13633 - DNA, 20 bp, Homo sapiens
agcacgaggtctggccaagg

SEQ ID NO: 13634 - DNA, 20 bp, Homo sapiens
ctcgacaaccccgtccacct

SEQ ID NO: 13635 - DNA, 20 bp, Homo sapiens
cgaggtctggccaaggtgga

SEQ ID NO: 13636 - DNA, 20 bp, Homo sapiens
gaggtctggccaaggtggac

SEQ ID NO: 13637 - DNA, 20 bp, Homo sapiens
aggtctggccaaggtggacg

SEQ ID NO: 13638 - DNA, 20 bp, Homo sapiens
gacggggttgtcgagatctc

SEQ ID NO: 13639 - DNA, 20 bp, Homo sapiens
accctccaaaaaacagcaag

SEQ ID NO: 13640 - DNA, 20 bp, Homo sapiens
caccctccaaaaaacagcaa

SEQ ID NO: 13641 - DNA, 20 bp, Homo sapiens
tcaccctccaaaaaacagca

SEQ ID NO: 13642 - DNA, 20 bp, Homo sapiens
aggagccccttgctgttttt

SEQ ID NO: 13643 - DNA, 20 bp, Homo sapiens
agccccttgctgttttttgg

SEQ ID NO: 13644 - DNA, 20 bp, Homo sapiens
gccccttgctgttttttgga

SEQ ID NO: 13645 - DNA, 20 bp, Homo sapiens
atcagagctgactatgttta

SEQ ID NO: 13646 - DNA, 20 bp, Homo sapiens
gggtctggatgagtagacag

SEQ ID NO: 13647 - DNA, 20 bp, Homo sapiens
ggggtctggatgagtagaca

SEQ ID NO: 13648 - DNA, 20 bp, Homo sapiens
tggggtctggatgagtagac

SEQ ID NO: 13649 - DNA, 20 bp, Homo sapiens
aagcctacaggcatggggtc

SEQ ID NO: 13650 - DNA, 20 bp, Homo sapiens
ctgataagcctacaggcatg

SEQ ID NO: 13651 - DNA, 20 bp, Homo sapiens
cctgataagcctacaggcat

SEQ ID NO: 13652 - DNA, 20 bp, Homo sapiens
ccctgataagcctacaggca

SEQ ID NO: 13653 - DNA, 20 bp, Homo sapiens
catccagaccccatgcctgt

SEQ ID NO: 13654 - DNA, 20 bp, Homo sapiens
taactccctgataagcctac

SEQ ID NO: 13655 - DNA, 20 bp, Homo sapiens
cccatgcctgtaggcttatc

SEQ ID NO: 13656 - DNA, 20 bp, Homo sapiens
ccatgcctgtaggcttatca

SEQ ID NO: 13657 - DNA, 20 bp, Homo sapiens
tcacccgtggcagctgagtt

SEQ ID NO: 13658 - DNA, 20 bp, Homo sapiens
ctcacccgtggcagctgagt

SEQ ID NO: 13659 - DNA, 20 bp, Homo sapiens
tgttcccaactcagctgcca

SEQ ID NO: 13660 - DNA, 20 bp, Homo sapiens
gttcccaactcagctgccac

SEQ ID NO: 13661 - DNA, 20 bp, Homo sapiens
acctcctgctctctcacccg

SEQ ID NO: 13662 - DNA, 20 bp, Homo sapiens
gctgccacgggtgagagagc

SEQ ID NO: 13663 - DNA, 20 bp, Homo sapiens
gccacgggtgagagagcagg
